United States Patent Application Publication US 2006/0046246 A1 - sequence listing, part 2

SEQ ID NO: 36049 - DNA, 20 bp, Bacteroides thetaiotaomicron
cctgccgataactcggggat

SEQ ID NO: 36050 - DNA, 20 bp, Streptococcus equi
cgagagtttgtaacaccccg

SEQ ID NO: 36051 - DNA, 20 bp, Bacillus sp
gcaaatcccacaaaaccatt

SEQ ID NO: 36052 - DNA, 20 bp, Anaerococcus prevotii
gtgatattaagcaaacctca

SEQ ID NO: 36053 - DNA, 20 bp, Moraxella osloensis
aagtaggtagcctaacgaaa

SEQ ID NO: 36054 - DNA, 20 bp, Aerococcus christensenii
aacttagaaagatggctctg

SEQ ID NO: 36055 - DNA, 20 bp, Shewanella algae
cgaggaggaaagggtgtaag

SEQ ID NO: 36056 - DNA, 20 bp, Haemophilus ducreyi
tgttgccagcatgtagtgat

SEQ ID NO: 36057 - DNA, 20 bp, Corynebacterium afermentans
ccagacgtttcctctatatg

SEQ ID NO: 36058 - DNA, 20 bp, Campylobacter lari
cttttcttagggaagaattc

SEQ ID NO: 36059 - DNA, 20 bp, Arcanobacterium bernardiae
acactgcgatgtgccagaga

SEQ ID NO: 36060 - DNA, 20 bp, Comamonas terrigena
ggccgcaaggttgaaactca

SEQ ID NO: 36061 - DNA, 20 bp, Methylobacterium mesophilicum
ctgttggggtgcttgcacct

SEQ ID NO: 36062 - DNA, 20 bp, Virgibacillus pantothenticus
gaaaggcggcatatgctgtc

SEQ ID NO: 36063 - DNA, 20 bp, Bacillus megaterium
agatgattgaaagatggttt

SEQ ID NO: 36064 - DNA, 20 bp, Bacillus sp
cctctgacggccctagagat

SEQ ID NO: 36065 - DNA, 20 bp, Prevotella oralis
tgatgtgcagcgcgaactgg

SEQ ID NO: 36066 - DNA, 20 bp, Cardiobacterium hominis
tgctccaggcgtcgagtggc

SEQ ID NO: 36067 - DNA, 20 bp, Bordetella bronchiseptica
aaacggcacgggctaatatc

SEQ ID NO: 36068 - DNA, 20 bp, Gemella morbillorum
atgctaacactatgagatgg

SEQ ID NO: 36069 - DNA, 20 bp, Arcanobacterium bernardiae
tacagaacaaggcctttttg

SEQ ID NO: 36070 - DNA, 20 bp, Clostridium ramosum
acctgccctagacaggggga

SEQ ID NO: 36071 - DNA, 20 bp, Pseudoramibacter alactolyticus
tgggagtaaagccttatatt

SEQ ID NO: 36072 - DNA, 20 bp, Weeksella virosa
tcaccaagtcgatgatcttt

SEQ ID NO: 36073 - DNA, 20 bp, Streptococcus constellatus
ggtgcaagagcatcactacc

SEQ ID NO: 36074 - DNA, 20 bp, Eikenella corrodens
aaaagggaagtgctaatacc

SEQ ID NO: 36075 - DNA, 20 bp, Aerococcus christensenii
gataagcgggggacaacatc

SEQ ID NO: 36076 - DNA, 20 bp, Campylobacter sputorum
cctttgacccttctagagat

SEQ ID NO: 36077 - DNA, 20 bp, Weeksella virosa
gtttaaagacggggactcta

SEQ ID NO: 36078 - DNA, 20 bp, Facklamia ignava
gttgttccagtcgcatgact

SEQ ID NO: 36079 - DNA, 20 bp, Prevotella corporis
ggcttcgatcggtaggggtt

SEQ ID NO: 36080 - DNA, 20 bp, Prevotella oris
ggccgtggattaagcgtgtt

SEQ ID NO: 36081 - DNA, 20 bp, Capnocytophaga gingivalis
acaattgacgctgagagacg

SEQ ID NO: 36082 - DNA, 20 bp, Corynebacterium accolens
gtgagggtctttctacgact

SEQ ID NO: 36083 - DNA, 20 bp, Gemella morbillorum
atgtagtaactatacatgta

SEQ ID NO: 36084 - DNA, 20 bp, Streptococcus constellatus
caagtagaccgcacaggatg

SEQ ID NO: 36085 - DNA, 20 bp, Bacteroides fragilis
tagcgggtgaccgtatgcta

SEQ ID NO: 36086 - DNA, 20 bp, Streptococcus porcinus
acccatgtcatctacttaaa

SEQ ID NO: 36087 - DNA, 20 bp, Clostridium ramosum
atggatggtgcagagggaag

SEQ ID NO: 36088 - DNA, 20 bp, Bacillus lentus
caactagaaccaagggttgc

SEQ ID NO: 36089 - DNA, 20 bp, Campylobacter curvus
ttggcagtaatgcacctaac

SEQ ID NO: 36090 - DNA, 20 bp, Weissella paramesenteroides
cggcactgagagtaactgtt

SEQ ID NO: 36091 - DNA, 20 bp, Actinomyces bovis
tagtttactaggagggagcc

SEQ ID NO: 36092 - DNA, 20 bp, Corynebacterium glucuronolyticum
cgtcgtctgtgtaatccagg

SEQ ID NO: 36093 - DNA, 20 bp, Fusobacterium mortiferum
ttgccctgcagtctgggaca

SEQ ID NO: 36094 - DNA, 20 bp, Fusobacterium necrophorum
atgcaagtcgactcgagtct

SEQ ID NO: 36095 - DNA, 20 bp, Vibrio cholerae
tctaccgggcaatttcccag

SEQ ID NO: 36096 - DNA, 20 bp, Actinomyces radingae
ggcctaaaactcaaaggaat

SEQ ID NO: 36097 - DNA, 20 bp, Neisseria meningitidis
gtcttgagagagaaagcagg

SEQ ID NO: 36098 - DNA, 20 bp, Streptococcus parasanguinis
gcggaggagttgcgaacggg

SEQ ID NO: 36099 - DNA, 20 bp, Clostridium glycolicum
gtcgaaggtgaaatcaataa

SEQ ID NO: 36100 - DNA, 20 bp, Campylobacter concisus
gggttttactggttttggat

SEQ ID NO: 36101 - DNA, 20 bp, Listeria innocua
aatgatagagtgtggcgcat

SEQ ID NO: 36102 - DNA, 20 bp, Pseudoramibacter alactolyticus
agtcgaacgagaaggttttg

SEQ ID NO: 36103 - DNA, 20 bp, Arcanobacterium bernardiae
aacttcggggttgcagtggg

SEQ ID NO: 36104 - DNA, 20 bp, Bacteroides fragilis
tttgtatgtattatatgaat

SEQ ID NO: 36105 - DNA, 20 bp, Prevotella oris
gaactggtccacttgagtgt

SEQ ID NO: 36106 - DNA, 20 bp, Porphyromonas endodontalis
taagacgcgaggaaggggcg

SEQ ID NO: 36107 - DNA, 20 bp, Prevotella denticola
ccacactaaaggcagttcat

SEQ ID NO: 36108 - DNA, 20 bp, Morganella morganii
cgcaccatcagatgaaccca

SEQ ID NO: 36109 - DNA, 20 bp, Clostridium tetani
ggagtaatctgctttgagat

SEQ ID NO: 36110 - DNA, 20 bp, Paenibacillus validus
ctcggagagtaactgctctg

SEQ ID NO: 36111 - DNA, 20 bp, Corynebacterium glucuronolyticum
gggctagagatagttcgtcc

SEQ ID NO: 36112 - DNA, 20 bp, Facklamia hominis
caacgaaggaaagacggctt

SEQ ID NO: 36113 - DNA, 20 bp, Acinetobacter genospecies 3
gtcgagcggagagaggtagc

SEQ ID NO: 36114 - DNA, 20 bp, Facklamia languida
tcgcaagggcaagcgaatct

SEQ ID NO: 36115 - DNA, 20 bp, Bacteroides fragilis
tccaacctgccctttactcg

SEQ ID NO: 36116 - DNA, 20 bp, Myroides odoratus
ctacctggcaacaggatgcg

SEQ ID NO: 36117 - DNA, 20 bp, Clostridium clostridiiforme
tgccttacactgggggataa

SEQ ID NO: 36118 - DNA, 20 bp, Prevotella denticola
cttcagttgccatcaggtag

SEQ ID NO: 36119 - DNA, 20 bp, Empedobacter brevis
ttttatctggggataaacct

SEQ ID NO: 36120 - DNA, 20 bp, Clostridium limosum
cctgggcttgacatcccaag

SEQ ID NO: 36121 - DNA, 20 bp, Fusobacterium varium
tacagagagctgcaaacctg

SEQ ID NO: 36122 - DNA, 20 bp, Bacteroides thetaiotaomicron
gttttccacgtgtggaattt

SEQ ID NO: 36123 - DNA, 20 bp, Paenibacillus amylolyticus
cctggggagataatgaaaga

SEQ ID NO: 36124 - DNA, 20 bp, Streptococcus thoraltensis
tgcgagctggtgacagtaag

SEQ ID NO: 36125 - DNA, 20 bp, Corynebacterium glucuronolyticum
atacgggcattgcttgagtg

SEQ ID NO: 36126 - DNA, 20 bp, Clostridium subterminale
tggttggtacaataagatgc

SEQ ID NO: 36127 - DNA, 20 bp, Propionibacterium freudenreichii
gcggttgatcacgtcggaag

SEQ ID NO: 36128 - DNA, 20 bp, Dermabacter hominis
actttgggataactccgaga

SEQ ID NO: 36129 - DNA, 20 bp, Clostridium botulinum
gattttcttatcaaagattt

SEQ ID NO: 36130 - DNA, 20 bp, Prevotella melaninogenica
tggatgcccgctgttggtac

SEQ ID NO: 36131 - DNA, 20 bp, Clostridium ramosum
ctgaagcttaacttcagtaa

SEQ ID NO: 36132 - DNA, 20 bp, Haemophilus actinemycetemcomitans
ggtttgtgccttagggagct

SEQ ID NO: 36133 - DNA, 20 bp, Corynebacterium group F
taccttgtgaggggatgcta

SEQ ID NO: 36134 - DNA, 20 bp, Brevibacillus agri
cgcatgatctgaaaagaaaa

SEQ ID NO: 36135 - DNA, 20 bp, Haemophilus segnis
gactaggtgattgacgttaa

SEQ ID NO: 36136 - DNA, 20 bp, Moraxella osloensis
ttcctggcataatattgaca

SEQ ID NO: 36137 - DNA, 20 bp, Weeksella virosa
catttagttttgaaagattt

SEQ ID NO: 36138 - DNA, 20 bp, Prevotella loescheii
agacgatgaggcccttcggg

SEQ ID NO: 36139 - DNA, 20 bp, Streptococcus constellatus
accgcataagaacatttact

SEQ ID NO: 36140 - DNA, 20 bp, Clostridium tetani
tcgcatgaaactttaaccaa

SEQ ID NO: 36141 - DNA, 20 bp, Corynebacterium group F
gtttgtgtaagtccacagct

SEQ ID NO: 36142 - DNA, 20 bp, Facklamia ignava
ccgcatagttgttccagtcg

SEQ ID NO: 36143 - DNA, 20 bp, Acinetobacter genospecies 3
cggctaattaagtcaaatgt

SEQ ID NO: 36144 - DNA, 20 bp, Clostridium clostridiiforme
ggcgaagcaagtctgaagtg

SEQ ID NO: 36145 - DNA, 20 bp, Bacteroides vulgatus
gatatacagcaagcggccaa

SEQ ID NO: 36146 - DNA, 20 bp, Bacteroides merdae
aaagattcatcgctgataga

SEQ ID NO: 36147 - DNA, 20 bp, Clostridium ramosum
tggacttatggcgcattagc

SEQ ID NO: 36148 - DNA, 20 bp, Staphylococcus carnosus
agtgcgtaggtaactatgcg

SEQ ID NO: 36149 - DNA, 20 bp, Klebsiella oxytoca
gtgaggttaataaccttatt

SEQ ID NO: 36150 - DNA, 20 bp, Burkholderia cepacia
gcagcacgggtgcttgccac

SEQ ID NO: 36151 - DNA, 20 bp, Streptococcus thoraltensis
agctctgttataagcgaaga

SEQ ID NO: 36152 - DNA, 20 bp, Bacteroides eggerthii
aaagattaatacccgatagt

SEQ ID NO: 36153 - DNA, 20 bp, Actinomyces neuii
gcctgtggcctaaccttttt

SEQ ID NO: 36154 - DNA, 20 bp, Unknown Organism
  oligonucleotide from CDC group EF-4B
cgcatacactttgagaagga

SEQ ID NO: 36155 - DNA, 20 bp, Corynebacterium glucuronolyticum
tttggttggcaggcgatacg

SEQ ID NO: 36156 - DNA, 20 bp, Aerococcus christensenii
gtacaacgggcagcgagctc

SEQ ID NO: 36157 - DNA, 20 bp, Granulicatella elegans
gaagaaggaaaagaggcttc

SEQ ID NO: 36158 - DNA, 20 bp, Prevotella disiens
acacacaacgtaggcggaat

SEQ ID NO: 36159 - DNA, 20 bp, Bacteroides vulgatus
gtggatgccaatccccaaaa

SEQ ID NO: 36160 - DNA, 20 bp, Corynebacterium coyleae
acaccagatcgccgtagaga

SEQ ID NO: 36161 - DNA, 20 bp, Facklamia hominis
tagcggagtgacggtatcta

SEQ ID NO: 36162 - DNA, 20 bp, Bacteroides uniformis
gtgatgctaatccctaaagc

SEQ ID NO: 36163 - DNA, 20 bp, Prevotella melaninogenica
tgggataacctgccgaaagg

SEQ ID NO: 36164 - DNA, 20 bp, Burkholderia gladioli
gaatcctggagagatctggg

SEQ ID NO: 36165 - DNA, 20 bp, Bacteroides uniformis
cagttgatactgggtgtctt

SEQ ID NO: 36166 - DNA, 20 bp, Fusobacterium mortiferum
cagttgggacgaagtaagtg

SEQ ID NO: 36167 - DNA, 20 bp, Bacteroides vulgatus
tgccaatccccaaaacctct

SEQ ID NO: 36168 - DNA, 20 bp, Campylobacter curvus
aagctagtcttggcagtaat

SEQ ID NO: 36169 - DNA, 20 bp, Bacteroides capilosus
ttatcgctctgagatggcct

SEQ ID NO: 36170 - DNA, 20 bp, Peptostreptococcus anaerobius
atatatttacggcatcgtag

SEQ ID NO: 36171 - DNA, 20 bp, Corynebacterium propinquum
ccttttggggtttctgtgcc

SEQ ID NO: 36172 - DNA, 20 bp, Facklamia ignava
gaacgcgccgagaagggaac

SEQ ID NO: 36173 - DNA, 20 bp, Actinomyces viscosus
ggaaaggtttgttccggtgg

SEQ ID NO: 36174 - DNA, 20 bp, Kocuria kristinae
acgctgaagcctggtgcttg

SEQ ID NO: 36175 - DNA, 20 bp, Methylobacterium mesophilicum
atggggagagattcccagtc

SEQ ID NO: 36176 - DNA, 20 bp, Actinobacillus ureae
gagtttggtgcccgaagcta

SEQ ID NO: 36177 - DNA, 20 bp, Acinetobacter radioresistens
ctagattaatactttaggat

SEQ ID NO: 36178 - DNA, 20 bp, Proteus vulgaris
ttgaactgtggcttctggag

SEQ ID NO: 36179 - DNA, 20 bp, Facklamia hominis
gagaagaacgaccgctagag

SEQ ID NO: 36180 - DNA, 20 bp, Leuconostoc lactis
tggtgtagggttgaaagatg

SEQ ID NO: 36181 - DNA, 20 bp, Prevotella melaninogenica
ctgcttttgtatggggataa

SEQ ID NO: 36182 - DNA, 20 bp, Anaerococcus prevotii
agtagcttaactactgtaag

SEQ ID NO: 36183 - DNA, 20 bp, Bacillus lentus
ttttctgggattcgctcatg

SEQ ID NO: 36184 - DNA, 20 bp, Actinomyces radingae
tcagaaatgggtgctaatac

SEQ ID NO: 36185 - DNA, 20 bp, Lactococcus garvieae
ggagttccttcgggacacgg

SEQ ID NO: 36186 - DNA, 20 bp, Streptococcus criceti
atccctagagatagggagtt

SEQ ID NO: 36187 - DNA, 20 bp, Corynebacterium glucuronolyticum
ccctgcactgggggataagc

SEQ ID NO: 36188 - DNA, 20 bp, Gemella sanguinis
cgagagcaagcaaacctcac

SEQ ID NO: 36189 - DNA, 20 bp, Corynebacterium glucuronolyticum
tctgtgtaatccaggggctt

SEQ ID NO: 36190 - DNA, 20 bp, Prevotella melaninogenica
ggtatcagcggctaagcgaa

SEQ ID NO: 36191 - DNA, 20 bp, Actinomyces neuii
gcggtttgtcgcgtctagcg

SEQ ID NO: 36192 - DNA, 20 bp, Fusobacterium nucleatum
tatttcagtgtcccttcggg

SEQ ID NO: 36193 - DNA, 20 bp, Helcococcus ovis
attttttaattaatttcttc

SEQ ID NO: 36194 - DNA, 20 bp, Actinomyces naeslundii
ctgggaaagattgcgccttt

SEQ ID NO: 36195 - DNA, 20 bp, Streptococcus parauberis
tgtactaaatttaaaaggag

SEQ ID NO: 36196 - DNA, 20 bp, Clostridium innocuum
aaccatgggagtcagtaata

SEQ ID NO: 36197 - DNA, 20 bp, Streptococcus alactolyticus
atgcaattgcatcactacga

SEQ ID NO: 36198 - DNA, 20 bp, Bacteroides capilosus
tgaaactgtagttcttgagt

SEQ ID NO: 36199 - DNA, 20 bp, Fusobacterium nucleatum
ctgatattatgattttaggg

SEQ ID NO: 36200 - DNA, 20 bp, Prevotella bivia
agagataatgaggtccttcg

SEQ ID NO: 36201 - DNA, 19 bp, Yersinia ruckeri
ctgcgggtggatcacctcc

SEQ ID NO: 36202 - DNA, 20 bp, Streptococcus gordonii
ccatagactgtgagttgcga

SEQ ID NO: 36203 - DNA, 20 bp, Pseudoramibacter alactolyticus
tgaacagagggccgcgaagc

SEQ ID NO: 36204 - DNA, 20 bp, Paenibacillus lautus
tcttctctcgcatgggagag

SEQ ID NO: 36205 - DNA, 20 bp, Actinomyces meyeri
aagccgcaactgtgggttgt

SEQ ID NO: 36206 - DNA, 20 bp, Fusobacterium varium
cgtgcctcttcggaggaact

SEQ ID NO: 36207 - DNA, 20 bp, Acinetobacter calcoaceticus
ccttcagatagtggacgtta

SEQ ID NO: 36208 - DNA, 20 bp, Bacillus circulans
atgaggaaaagctgaaagac

SEQ ID NO: 36209 - DNA, 20 bp, Bacteroides fragilis
ttaatacccgatggcataat

SEQ ID NO: 36210 - DNA, 20 bp, Corynebacterium glucuronolyticum
aggcgatacgggcattgctt

SEQ ID NO: 36211 - DNA, 20 bp, Weeksella virosa
ttgaaggtagcatatgaata

SEQ ID NO: 36212 - DNA, 20 bp, Capnocytophaga gingivalis
gatacgcccttcttcggaca

SEQ ID NO: 36213 - DNA, 20 bp, Corynebacterium coyleae
ccacattttggatggtgtgg

SEQ ID NO: 36214 - DNA, 20 bp, Chromobacterium violaceum
ggaggaaatcccgctggtta

SEQ ID NO: 36215 - DNA, 20 bp, Bacteroides capilosus
aaatccctaaaagccatccc

SEQ ID NO: 36216 - DNA, 20 bp, Cardiobacterium hominis
aagaggaaagcggaatttcc

SEQ ID NO: 36217 - DNA, 20 bp, Neisseria subflava
gaaaaggatagggttaatac

SEQ ID NO: 36218 - DNA, 20 bp, Actinomyces bovis
atggcggatacaggtggtgc

SEQ ID NO: 36219 - DNA, 20 bp, Pseudomonas citronellolis
gtaggtggtttggtaagatg

SEQ ID NO: 36220 - DNA, 20 bp, Clostridium ramosum
cttgacatactcataaaggc

SEQ ID NO: 36221 - DNA, 20 bp, Streptococcus gallolyticus
agacttgaaagatgcaattg

SEQ ID NO: 36222 - DNA, 20 bp, Anaerococcus tetradius
tacacaaggggatagccttt

SEQ ID NO: 36223 - DNA, 20 bp, Haemophilus segnis
gaagcgagagtgcgagctgg

SEQ ID NO: 36224 - DNA, 20 bp, Bacillus coagulans
catggaggaaaaaggaaagg

SEQ ID NO: 36225 - DNA, 20 bp, Actinomyces bovis
cgcaaaagcacagagatgtg

SEQ ID NO: 36226 - DNA, 20 bp, Fusobacterium varium
tcagttgggaagaagtcagt

SEQ ID NO: 36227 - DNA, 20 bp, Gemella haemolysans
atacacagtagagacggtac

SEQ ID NO: 36228 - DNA, 20 bp, Propionibacterium acnes
cagagatgggtgtgcctctt

SEQ ID NO: 36229 - DNA, 20 bp, Bacillus sp
agcttgcttttgatcagtta

SEQ ID NO: 36230 - DNA, 20 bp, Streptococcus uberis
atttaaaaggggcaaatgct

SEQ ID NO: 36231 - DNA, 20 bp, Streptococcus parasanguinis
tgcaccgagcggaggagttg

SEQ ID NO: 36232 - DNA, 20 bp, Bacteroides vulgatus
ccaatccccaaaacctctct

SEQ ID NO: 36233 - DNA, 20 bp, Peptostreptococcus anaerobius
gattatccaaccgcaaggag

SEQ ID NO: 36234 - DNA, 20 bp, Helcococcus kunzii
aatcgcataaaacagatctc

SEQ ID NO: 36235 - DNA, 20 bp, Kingella denitrificans
aacatattggaatgtaccga

SEQ ID NO: 36236 - DNA, 20 bp, Prevotella loescheii
ttcgatgatacgcgaggaac

SEQ ID NO: 36237 - DNA, 20 bp, Brevibacterium casei
agaggcgaacccgtgagggc

SEQ ID NO: 36238 - DNA, 20 bp, Corynebacterium coyleae
gtttgtgtaagcccgcagct

SEQ ID NO: 36239 - DNA, 20 bp, Prevotella loescheii
cgagggtcggcctagggtga

SEQ ID NO: 36240 - DNA, 20 bp, Bacillus cereus
attttgaactgcatggttcg

SEQ ID NO: 36241 - DNA, 20 bp, Budvicia aquatica
ggcatgacccgtggcttccg

SEQ ID NO: 36242 - DNA, 20 bp, Gemella sanguinis
atgattgtatagtaactata

SEQ ID NO: 36243 - DNA, 20 bp, Streptococcus salivarius
tcatgtcatttatttgaaag

SEQ ID NO: 36244 - DNA, 20 bp, Propionibacterium freudenreichii
acttgaggaatgtaggggag

SEQ ID NO: 36245 - DNA, 20 bp, Gemella bergeri
tgttagggaagaaaggttgt

SEQ ID NO: 36246 - DNA, 20 bp, Alicyclobacillus acidocaldarius
ccgtctcgcatggggctttc

SEQ ID NO: 36247 - DNA, 20 bp, Tissierella praeacuta
tgcctttagttgctaacaga

SEQ ID NO: 36248 - DNA, 20 bp, Oligella ureolytica
atcccgcgtgtgggacgaag

SEQ ID NO: 36249 - DNA, 20 bp, Fusobacterium mortiferum
attagcagagatgcttttgt

SEQ ID NO: 36250 - DNA, 20 bp, Paenibacillus macerans
gtggctcaaccacagttcgc

SEQ ID NO: 36251 - DNA, 20 bp, Brevibacillus laterosporus
cttcgcgagaagatgctaat

SEQ ID NO: 36252 - DNA, 20 bp, Facklamia sourekii
tacgggacaaggagacaggt

SEQ ID NO: 36253 - DNA, 20 bp, Paenibacillus pabuli
ctgccctcaagtttgggaca

SEQ ID NO: 36254 - DNA, 20 bp, Geobacillus thermoglucosidasius
ttccgcttggttagcggcgg

SEQ ID NO: 36255 - DNA, 20 bp, Vibrio fluvialis
tatcttttgacgttagctgc

SEQ ID NO: 36256 - DNA, 20 bp, Brevibacterium epidermidis
ttcttctctttggagctggt

SEQ ID NO: 36257 - DNA, 20 bp, Clostridium limosum
taggtgtcggggtttcaata

SEQ ID NO: 36258 - DNA, 20 bp, Geobacillus thermoglucosidasius
ggagacagggcgttccccct

SEQ ID NO: 36259 - DNA, 20 bp, Propionibacterium acnes
gaagtgtaatcttggggctt

SEQ ID NO: 36260 - DNA, 20 bp, Clostridium innocuum
aagcgaatctcataaaggtc

SEQ ID NO: 36261 - DNA, 20 bp, Bacteroides fragilis
gctttctttgctggcgaccg

SEQ ID NO: 36262 - DNA, 20 bp, Moraxella osloensis
gagaggctaatggttaatac

SEQ ID NO: 36263 - DNA, 20 bp, Clostridium subterminale
cttataaaaccaatcccagt

SEQ ID NO: 36264 - DNA, 20 bp, Atopobium parvulum
gggggctcaacccccgctcg

SEQ ID NO: 36265 - DNA, 20 bp, Anaerobiospirillum succiniciproducens
tgaggtggagtggaacccac

SEQ ID NO: 36266 - DNA, 20 bp, Aneurinibacillus aneurinilyticus
tctgaaagagaaagaccttt

SEQ ID NO: 36267 - DNA, 20 bp, Anaerobiospirillum succiniciproducens
gaatcttttagagataagag

SEQ ID NO: 36268 - DNA, 20 bp, Bacteroides fragilis
tttactcggggatagccttt

SEQ ID NO: 36269 - DNA, 20 bp, Streptococcus dysgalactiae
cggtctagagatagactttc

SEQ ID NO: 36270 - DNA, 20 bp, Streptococcus gordonii
catagactgtgagttgcgaa

SEQ ID NO: 36271 - DNA, 20 bp, Peptostreptococcus anaerobius
tccaaccgcaaggaggaagt

SEQ ID NO: 36272 - DNA, 20 bp, Leuconostoc lactis
gtaactgatcaggtagtgac

SEQ ID NO: 36273 - DNA, 20 bp, Tetragenococcus halophilus
gcaacccttaggggagccag

SEQ ID NO: 36274 - DNA, 20 bp, Bacteroides forsythus
agctaccgggcgaccggatg

SEQ ID NO: 36275 - DNA, 20 bp, Lactococcus lactis
acttgtaccgactggatgag

SEQ ID NO: 36276 - DNA, 20 bp, Actinomyces radingae
tttaaagcttgtctcagttc

SEQ ID NO: 36277 - DNA, 20 bp, Anaerococcus tetradius
atctgaagcgaaactcacaa

SEQ ID NO: 36278 - DNA, 20 bp, Bacteroides fragilis
gcagtatgtatactgttttg

SEQ ID NO: 36279 - DNA, 20 bp, Arcanobacterium bernardiae
gtgtggggccttttccacgg

SEQ ID NO: 36280 - DNA, 20 bp, Prevotella disiens
acagagatgttgaggtcctt

SEQ ID NO: 36281 - DNA, 20 bp, Streptococcus constellatus
gtagatgtttaaaaggtgca

SEQ ID NO: 36282 - DNA, 20 bp, Bacillus lentus
caacaaaaagcaagcttctt

SEQ ID NO: 36283 - DNA, 20 bp, Comamonas terrigena
ctaataccgcatgagaactg

SEQ ID NO: 36284 - DNA, 20 bp, Neisseria lactamica
ccttatgaccggggcttcac

SEQ ID NO: 36285 - DNA, 20 bp, Streptococcus ratti
tattaattattgcatgataa

SEQ ID NO: 36286 - DNA, 20 bp, Bacillus cereus
gattgagagcttgctctcaa

SEQ ID NO: 36287 - DNA, 20 bp, Streptococcus agalactiae
tttacactagactgatgagt

SEQ ID NO: 36288 - DNA, 20 bp, Bacteroides merdae
ctagttactaacaggtgaag

SEQ ID NO: 36289 - DNA, 20 bp, Facklamia languida
ccggagtgacggtatctaac

SEQ ID NO: 36290 - DNA, 20 bp, Prevotella melaninogenica
gatgcccgctgttggtacct

SEQ ID NO: 36291 - DNA, 20 bp, Helcococcus ovis
aactaagaagcaagccctgg

SEQ ID NO: 36292 - DNA, 20 bp, Brevibacillus choshinensis
cgcatggtctgaaagggaaa

SEQ ID NO: 36293 - DNA, 20 bp, Facklamia ignava
gaagaatagcctgtagagta

SEQ ID NO: 36294 - DNA, 20 bp, Haemophilus actinemycetemcomitans
gatgggtttgtgccttaggg

SEQ ID NO: 36295 - DNA, 20 bp, Corynebacterium glucuronolyticum
cagcttgctggagtgctcga

SEQ ID NO: 36296 - DNA, 20 bp, Citrobacter sedlakii
cctcttgccaccggatgtgc

SEQ ID NO: 36297 - DNA, 20 bp, Paenibacillus azotofixans
ctggaaactggacagcttga

SEQ ID NO: 36298 - DNA, 20 bp, Collinsella aerofaciens
acgatccccccgtgccgcag

SEQ ID NO: 36299 - DNA, 20 bp, Bacteroides capilosus
gcgtgtaggcgggactgcaa

SEQ ID NO: 36300 - DNA, 20 bp, Moraxella osloensis
aggagaggctaatggttaat

SEQ ID NO: 36301 - DNA, 20 bp, Weeksella virosa
tactaagtctatattgacgc

SEQ ID NO: 36302 - DNA, 20 bp, Clostridium clostridiiforme
ggcggggcaggtaactgggg

SEQ ID NO: 36303 - DNA, 20 bp, Lactococcus lactis
aagtgacggtaactacccag

SEQ ID NO: 36304 - DNA, 20 bp, Methylobacterium mesophilicum
tttggggaaaggcttgctgc

SEQ ID NO: 36305 - DNA, 20 bp, Paenibacillus popilliae
ggaagcgaaggcgcgaggtg

SEQ ID NO: 36306 - DNA, 20 bp, Corynebacterium group F
ctttttggatattgttgtgg

SEQ ID NO: 36307 - DNA, 20 bp, Granulicatella adiacens
ggcttgcactggtcaatcta

SEQ ID NO: 36308 - DNA, 20 bp, Eggerthella lenta
aacccccggccggatcccga

SEQ ID NO: 36309 - DNA, 20 bp, Fusobacterium varium
tgttttcgtgcctcttcgga

SEQ ID NO: 36310 - DNA, 20 bp, Anaerococcus prevotii
ataattcggtgccgcagtta

SEQ ID NO: 36311 - DNA, 20 bp, Moraxella  catarrhalis
agttaggaagcttgcttctg

SEQ ID NO: 36312 - DNA, 20 bp, Moraxella lacunata
agtcgttgggtctcttgaag

SEQ ID NO: 36313 - DNA, 20 bp, Anaerococcus prevotii
gcttaactactgtaagcatt

SEQ ID NO: 36314 - DNA, 20 bp, Weissella paramesenteroides
agagaagaacggcactgaga

SEQ ID NO: 36315 - DNA, 20 bp, Prevotella bivia
gtccttcgggacatctgtga

SEQ ID NO: 36316 - DNA, 20 bp, Streptococcus thermophilus
tttatttgaaaggggcaatt

SEQ ID NO: 36317 - DNA, 20 bp, Paenibacillus pabuli
tgtgaagccgcgaggtggaa

SEQ ID NO: 36318 - DNA, 20 bp, Paenibacillus validus
gcaagtcgagcggacttatc

SEQ ID NO: 36319 - DNA, 20 bp, Prevotella melaninogenica
tcgatgacggcatcagattt

SEQ ID NO: 36320 - DNA, 20 bp, Cardiobacterium hominis
gcatttgaaactgggcgact

SEQ ID NO: 36321 - DNA, 20 bp, Morganella morganii
cgggaattgcatctgatact

SEQ ID NO: 36322 - DNA, 20 bp, Leptotrichia buccalis
gccaatctttaaagccggtc

SEQ ID NO: 36323 - DNA, 20 bp, Clostridium botulinum
gaatcgcatgattttcttat

SEQ ID NO: 36324 - DNA, 20 bp, Campylobacter sputorum
cttattgcgaaggcgatctg

SEQ ID NO: 36325 - DNA, 20 bp, Mannheimia haemolytica
tgggaccatttggccacctg

SEQ ID NO: 36326 - DNA, 20 bp, Corynebacterium falsenii
gggaagaagccacttgtggt

SEQ ID NO: 36327 - DNA, 20 bp, Corynebacterium amycolatum
cagagatggtgtttcccttg

SEQ ID NO: 36328 - DNA, 20 bp, Clostridium ramosum
gttataaaggaagaacggcg

SEQ ID NO: 36329 - DNA, 20 bp, Cardiobacterium hominis
gctccaggcgtcgagtggcg

SEQ ID NO: 36330 - DNA, 20 bp, Clostridium butyricum
gatgcaacctcgcgagagtg

SEQ ID NO: 36331 - DNA, 20 bp, Burkholderia gladioli
aaatcctgagggctaatatc

SEQ ID NO: 36332 - DNA, 20 bp, Streptococcus constellatus
ccctctgaccactctagaga

SEQ ID NO: 36333 - DNA, 20 bp, Kocuria kristinae
atcgttccagagatggttct

SEQ ID NO: 36334 - DNA, 20 bp, Alcaligenes faecalis
aaagcgtgtgtaggcggttc

SEQ ID NO: 36335 - DNA, 20 bp, Corynebacterium glucuronolyticum
gtgatctgccctgcactggg

SEQ ID NO: 36336 - DNA, 20 bp, Gemella morbillorum
aagaatggatatgtagtaac

SEQ ID NO: 36337 - DNA, 20 bp, Arcanobacterium haemolyticum
ggcgaaagttgagggtaggt

SEQ ID NO: 36338 - DNA, 20 bp, Prevotella intermedia
gcgggtaacggcccaccaag

SEQ ID NO: 36339 - DNA, 20 bp, Fusobacterium nucleatum
ctaatacctaatattatgat

SEQ ID NO: 36340 - DNA, 20 bp, Helcococcus kunzii
ctcgtgagagcaagcgaatc

SEQ ID NO: 36341 - DNA, 20 bp, Propionibacterium freudenreichii
acgtgcccttgacttcggta

SEQ ID NO: 36342 - DNA, 20 bp, Campylobacter curvus
tgctgagctagtcttggcag

SEQ ID NO: 36343 - DNA, 20 bp, Anaerobiospirillum succiniciproducens
ggggcgtacagagggaaacg

SEQ ID NO: 36344 - DNA, 20 bp, Bacteroides ureolyticus
ctcctatttaacataagtta

SEQ ID NO: 36345 - DNA, 20 bp, Ignavigranum ruoffiae
cgaaggagcttgcttcttcc

SEQ ID NO: 36346 - DNA, 20 bp, Arcanobacterium haemolyticum
ttgtgagggtgagcgaatcc

SEQ ID NO: 36347 - DNA, 20 bp, Clostridium septicum
tgtgggaggtatcaactcct

SEQ ID NO: 36348 - DNA, 20 bp, Neisseria meningitidis
ctccctctgacacactcgag

SEQ ID NO: 36349 - DNA, 20 bp, Tetragenococcus halophilus
caacccttaggggagccagc

SEQ ID NO: 36350 - DNA, 20 bp, Anaerococcus prevotii
accataagaaaaagccccgg

SEQ ID NO: 36351 - DNA, 20 bp, Peptostreptococcus anaerobius
ttactaatacatgataatat

SEQ ID NO: 36352 - DNA, 20 bp, Ignavigranum ruoffiae
ggcgttaacgcaataaacat

SEQ ID NO: 36353 - DNA, 20 bp, Streptococcus canis
accgcataaaagtgcttaac

SEQ ID NO: 36354 - DNA, 20 bp, Prevotella denticola
ccacaagggacactacatct

SEQ ID NO: 36355 - DNA, 20 bp, Corynebacterium jeikeium
ggggttttatttacgattcc

SEQ ID NO: 36356 - DNA, 20 bp, Oligella urethralis
tcagcatcttaaggtattag

SEQ ID NO: 36357 - DNA, 20 bp, Propionibacterium propionicus
ggtttggaaagttctggcgg

SEQ ID NO: 36358 - DNA, 20 bp, Anaerococcus tetradius
gacgaataataccctatgac

SEQ ID NO: 36359 - DNA, 20 bp, Prevotella loescheii
tccccgatggcgaccggcgc

SEQ ID NO: 36360 - DNA, 20 bp, Tetragenococcus halophilus
catatggctttttttcacct

SEQ ID NO: 36361 - DNA, 20 bp, Streptococcus equi
taggtaacctagcttatagc

SEQ ID NO: 36362 - DNA, 20 bp, Alcaligenes faecalis
tgtctggaaagccgaagaga

SEQ ID NO: 36363 - DNA, 20 bp, Kocuria kristinae
acaccggatcgttccagaga

SEQ ID NO: 36364 - DNA, 20 bp, Neisseria polysaccharea
ataccagaagtgggtaggat

SEQ ID NO: 36365 - DNA, 20 bp, Bacteroides uniformis
aggcagctacacggcgacgt

SEQ ID NO: 36366 - DNA, 20 bp, Streptococcus salivarius
gtcaagaacgagtgtgagag

SEQ ID NO: 36367 - DNA, 20 bp, Vibrio cholerae
gtaggtaacgtcaaatgatt

SEQ ID NO: 36368 - DNA, 20 bp, Facklamia sourekii
gaagtcgtgaggccaagcga

SEQ ID NO: 36369 - DNA, 20 bp, Proteus vulgaris
atgtcgatttagaggttgtg

SEQ ID NO: 36370 - DNA, 20 bp, Kytococcus sedentarius
aacatacgtgtaagtaacta

SEQ ID NO: 36371 - DNA, 20 bp, Neisseria meningitidis
tcgccacccgagaagcaagc

SEQ ID NO: 36372 - DNA, 20 bp, Corynebacterium macginleyi
cctaaacgtgttagggagcc

SEQ ID NO: 36373 - DNA, 20 bp, Finegoldia magna
attaataccgcataaaatcg

SEQ ID NO: 36374 - DNA, 20 bp, Prevotella melaninogenica
gaaatgtagacgctcaacgt

SEQ ID NO: 36375 - DNA, 20 bp, Haemophilus paraphrophilus
ttgttgtgttaatagcgcaa

SEQ ID NO: 36376 - DNA, 20 bp, Cardiobacterium hominis
gcgcacgcaggcggttgccc

SEQ ID NO: 36377 - DNA, 20 bp, Moraxella lacunata
cgagagaaagggggctttta

SEQ ID NO: 36378 - DNA, 20 bp, Oligella urethralis
ccggtgcttattcctcaact

SEQ ID NO: 36379 - DNA, 20 bp, Actinomyces bovis
gtcttgacataccgcgcaaa

SEQ ID NO: 36380 - DNA, 20 bp, Peptoniphilus indolicus
cgggcaagctagcgatagca

SEQ ID NO: 36381 - DNA, 20 bp, Vibrio cholerae
tatccggtagcgcaaggccc

SEQ ID NO: 36382 - DNA, 20 bp, Prevotella intermedia
cggcattatgtgcttgcaca

SEQ ID NO: 36383 - DNA, 20 bp, Serratia proteamaculans
cacattgcattgacgttact

SEQ ID NO: 36384 - DNA, 20 bp, Clostridium subterminale
ggtaccatatgaggaagcca

SEQ ID NO: 36385 - DNA, 20 bp, Moraxella atlantae
ctttctggcacaatactgac

SEQ ID NO: 36386 - DNA, 20 bp, Eggerthella lenta
ggaggctcgagttcggtaga

SEQ ID NO: 36387 - DNA, 20 bp, Clostridium innocuum
tcatagaggaaatgctatgg

SEQ ID NO: 36388 - DNA, 20 bp, Paenibacillus popilliae
cagggaagaacgccttgtag

SEQ ID NO: 36389 - DNA, 20 bp, Paenibacillus lautus
gaataatgaaagacggagca

SEQ ID NO: 36390 - DNA, 20 bp, Staphylococcus carnosus
actatgcgcaccttgacggt

SEQ ID NO: 36391 - DNA, 20 bp, Neisseria lactamica
cgctatccgagcggccgata

SEQ ID NO: 36392 - DNA, 20 bp, Corynebacterium coyleae
accagatcgccgtagagata

SEQ ID NO: 36393 - DNA, 20 bp, Corynebacterium striatum
gatacgtcctcccttgtggt

SEQ ID NO: 36394 - DNA, 20 bp, Tetragenococcus halophilus
tcacctgaaagaaagctcaa

SEQ ID NO: 36395 - DNA, 20 bp, Comamonas terrigena
atgagaactgaggttgaaag

SEQ ID NO: 36396 - DNA, 20 bp, Oligella urethralis
ttcttcgttgagaaaagtgg

SEQ ID NO: 36397 - DNA, 20 bp, Pseudomonas fluorescens
tgggaggaagggtacttacc

SEQ ID NO: 36398 - DNA, 20 bp, Haemophilus paraphrophilus
tgttaatagcgcaacaaatt

SEQ ID NO: 36399 - DNA, 20 bp, Streptococcus dysgalactiae
caccggttcaaggagttgcg

SEQ ID NO: 36400 - DNA, 20 bp, Lactococcus raffinolactis
tcgtgctattcctagagata

SEQ ID NO: 36401 - DNA, 20 bp, Streptococcus thermophilus
accgcataaaagtcgatatc

SEQ ID NO: 36402 - DNA, 20 bp, Veillonella atypica
gtcttgacattgatggacag

SEQ ID NO: 36403 - DNA, 20 bp, Neisseria elongata
gcttgactgcttagtagcgt

SEQ ID NO: 36404 - DNA, 20 bp, Virgibacillus pantothenticus
cggcatatgctgtcacttac

SEQ ID NO: 36405 - DNA, 20 bp, Fusobacterium varium
gggaagaagtcagtgacggt

SEQ ID NO: 36406 - DNA, 20 bp, Bordetella bronchiseptica
ggctaatatcctgtgcaact

SEQ ID NO: 36407 - DNA, 20 bp, Clostridium subterminale
cggtaccatatgaggaagcc

SEQ ID NO: 36408 - DNA, 20 bp, Bacteroides uniformis
ttgaattgcaactgaatgat

SEQ ID NO: 36409 - DNA, 20 bp, Actinomyces bovis
gaagtgaagaggagcttgct

SEQ ID NO: 36410 - DNA, 20 bp, Clostridium ramosum
aatggatggtgcagagggaa

SEQ ID NO: 36411 - DNA, 20 bp, Aneurinibacillus thermoaerophilus
tgacctcccggtctgacggt

SEQ ID NO: 36412 - DNA, 20 bp, Haemophilus influenzae
tgttaatagcacatcaaatt

SEQ ID NO: 36413 - DNA, 20 bp, Corynebacterium group F
tacagcgcgtttgctacctt

SEQ ID NO: 36414 - DNA, 20 bp, Bacillus sp
ctctgacggccctagagata

SEQ ID NO: 36415 - DNA, 20 bp, Anaerococcus tetradius
aataatatagctcaactata

SEQ ID NO: 36416 - DNA, 20 bp, Leptotrichia buccalis
gcacctgaagccgccggtcc

SEQ ID NO: 36417 - DNA, 20 bp, Corynebacterium afermentans
accgaaattctttccagcta

SEQ ID NO: 36418 - DNA, 20 bp, Paenibacillus peoriae
agcttgcttctaaacaacct

SEQ ID NO: 36419 - DNA, 20 bp, Streptococcus equi
gttaaggagccagccgccta

SEQ ID NO: 36420 - DNA, 20 bp, Bacillus azotoformans
ggagcttgctcctttagatt

SEQ ID NO: 36421 - DNA, 20 bp, Anaerobiospirillum succiniciproducens
gaaggcggtctcctgggcaa

SEQ ID NO: 36422 - DNA, 20 bp, Kingella denitrificans
cagcgggggtgcttgcacct

SEQ ID NO: 36423 - DNA, 20 bp, Tissierella praeacuta
cttatgacacttaaatgtcg

SEQ ID NO: 36424 - DNA, 20 bp, Kingella denitrificans
agcgggggtgcttgcacctg

SEQ ID NO: 36425 - DNA, 20 bp, Veillonella atypica
actgctgatctagagtatcg

SEQ ID NO: 36426 - DNA, 20 bp, Corynebacterium glucuronolyticum
cgggcattgcttgagtgctg

SEQ ID NO: 36427 - DNA, 20 bp, Facklamia ignava
taggtttgacggtaactgat

SEQ ID NO: 36428 - DNA, 20 bp, Neisseria subflava
aggatagggttaatacccct

SEQ ID NO: 36429 - DNA, 20 bp, Proteus vulgaris
aactgtggcttctggagcta

SEQ ID NO: 36430 - DNA, 20 bp, Bacteroides capilosus
ggccgaaggtgggttcgata

SEQ ID NO: 36431 - DNA, 20 bp, Actinomyces naeslundii
tggtgggcctgggaaagatt

SEQ ID NO: 36432 - DNA, 20 bp, Kocuria varians
tctgggactaagtcgtaaca

SEQ ID NO: 36433 - DNA, 20 bp, Corynebacterium group ANF
ggataactcgcggaaacgcg

SEQ ID NO: 36434 - DNA, 20 bp, Gordonia bronchialis
gatgtggtttgccttgtgcc

SEQ ID NO: 36435 - DNA, 20 bp, Haemophilus ducreyi
gaacggtagcacgaaggact

SEQ ID NO: 36436 - DNA, 20 bp, Kocuria kristinae
gtactggtcttagatgggct

SEQ ID NO: 36437 - DNA, 20 bp, Cardiobacterium hominis
tcggtacagacggtagcgaa

SEQ ID NO: 36438 - DNA, 20 bp, Lactococcus garvieae
caggtcttgacatactcgtg

SEQ ID NO: 36439 - DNA, 20 bp, Bacillus simplex
tcttttctcgcatgagagaa

SEQ ID NO: 36440 - DNA, 20 bp, Arcanobacterium bernardiae
ttttggttgagggtatgtgc

SEQ ID NO: 36441 - DNA, 20 bp, Anaerobiospirillum succiniciproducens
ggttccgcagctaacgcgat

SEQ ID NO: 36442 - DNA, 20 bp, Kingella denitrificans
agaaaagggaagtgttaata

SEQ ID NO: 36443 - DNA, 20 bp, Corynebacterium coyleae
ttttggatggtgtggtggaa

SEQ ID NO: 36444 - DNA, 20 bp, Pseudoramibacter alactolyticus
tattggggaagaaaacatga

SEQ ID NO: 36445 - DNA, 20 bp, Bacillus pallidus
tagagggtatccacccttta

SEQ ID NO: 36446 - DNA, 20 bp, Bacillus sp
actggataacttttctctcc

SEQ ID NO: 36447 - DNA, 20 bp, Lactococcus lactis
actttaaacacaagttttaa

SEQ ID NO: 36448 - DNA, 20 bp, Paenibacillus glucanolyticus
ttgccaaggaagaacgtctc

SEQ ID NO: 36449 - DNA, 20 bp, Turicella otitidis
accggataggagccattttt

SEQ ID NO: 36450 - DNA, 20 bp, Propionibacterium avidum
caaccctcgttcactgttgc

SEQ ID NO: 36451 - DNA, 20 bp, Moraxella atlantae
cgcaagagggcgcttaccac

SEQ ID NO: 36452 - DNA, 20 bp, Anaerococcus tetradius
atatagctcaactatataaa

SEQ ID NO: 36453 - DNA, 20 bp, Bacillus pallidus
gcagactgggataacttcgg

SEQ ID NO: 36454 - DNA, 20 bp, Paenibacillus apiarius
tgtttaaacctagggctcaa

SEQ ID NO: 36455 - DNA, 20 bp, Brevibacillus choshinensis
gctaggtgttggggactcca

SEQ ID NO: 36456 - DNA, 20 bp, Clostridium paraputrificum
aatgtgggaagtcccttcgg

SEQ ID NO: 36457 - DNA, 20 bp, Corynebacterium group ANF
acggatcccttcggggtgaa

SEQ ID NO: 36458 - DNA, 20 bp, Clostridium innocuum
tccaaaaagacttagtggcg

SEQ ID NO: 36459 - DNA, 20 bp, Streptococcus acidominimus
gttgtaagagaagaacgtta

SEQ ID NO: 36460 - DNA, 20 bp, Fusobacterium necrophorum
tgctttcagtcgggaagaag

SEQ ID NO: 36461 - DNA, 20 bp, Gemella haemolysans
cacggtgggacagatgattg

SEQ ID NO: 36462 - DNA, 20 bp, Staphylococcus condimenti
ttctgcaatgaaagacggtc

SEQ ID NO: 36463 - DNA, 20 bp, Streptococcus thermophilus
tccactacaagatggacctg

SEQ ID NO: 36464 - DNA, 20 bp, Corynebacterium glucuronolyticum
gcattgcttgagtgctgtag

SEQ ID NO: 36465 - DNA, 20 bp, Pediococcus pentosaceus
gctaataccgtataacagag

SEQ ID NO: 36466 - DNA, 20 bp, Streptococcus mitis
gcatgacatttgcttaaaag

SEQ ID NO: 36467 - DNA, 20 bp, Geobacillus thermoglucosidasius
tggagacagggcgttccccc

SEQ ID NO: 36468 - DNA, 20 bp, Clostridium botulinum
ttattgctttgagatggacc

SEQ ID NO: 36469 - DNA, 20 bp, Prevotella melaninogenica
gtttccttgagtacgcacaa

SEQ ID NO: 36470 - DNA, 20 bp, Granulicatella adiacens
cactggtcaatctagtggcg

SEQ ID NO: 36471 - DNA, 20 bp, Paenibacillus amylolyticus
gctaccggagtgacggtacc

SEQ ID NO: 36472 - DNA, 20 bp, Anaerococcus tetradius
aaacgacgaataatacccta

SEQ ID NO: 36473 - DNA, 20 bp, Vagococcus fluvialis
atcaaagagtggcggacggg

SEQ ID NO: 36474 - DNA, 20 bp, Haemophilus actinemycetemcomitans
gggtttagccctggtgcccg

SEQ ID NO: 36475 - DNA, 20 bp, Aerococcus christensenii
cttgcactttcaaagttagc

SEQ ID NO: 36476 - DNA, 20 bp, Vibrio cholerae
ttgtcagtttcaaatgcgat

SEQ ID NO: 36477 - DNA, 20 bp, Gemella morbillorum
atatgtagtaactatacatg

SEQ ID NO: 36478 - DNA, 20 bp, Tissierella praeacuta
ataccttatgacacttaaat

SEQ ID NO: 36479 - DNA, 20 bp, Enterococcus cecorum
tggaaagttcatcccttgac

SEQ ID NO: 36480 - DNA, 20 bp, Brevibacillus choshinensis
tgttggggactccaatcctc

SEQ ID NO: 36481 - DNA, 20 bp, Geobacillus thermoglucosidasius
aagtcgagcggaccgggcgg

SEQ ID NO: 36482 - DNA, 20 bp, Streptococcus parasanguinis
catcactaagagatggacct

SEQ ID NO: 36483 - DNA, 20 bp, Aneurinibacillus thermoaerophilus
ccgctgacccctccagagat

SEQ ID NO: 36484 - DNA, 20 bp, Clostridium limosum
aatcctgtggaaacacggga

SEQ ID NO: 36485 - DNA, 20 bp, Clostridium tetani
tacaggagagggaaacggaa

SEQ ID NO: 36486 - DNA, 20 bp, Campylobacter concisus
cttgtggggctggtgtacag

SEQ ID NO: 36487 - DNA, 20 bp, Empedobacter brevis
aagtacagagggcagctact

SEQ ID NO: 36488 - DNA, 20 bp, Facklamia ignava
ccgtggagttgcattggaaa

SEQ ID NO: 36489 - DNA, 20 bp, Leptotrichia buccalis
gtggacggaactgcacgagt

SEQ ID NO: 36490 - DNA, 20 bp, Haemophilus segnis
tatacagagggcgacgaagc

SEQ ID NO: 36491 - DNA, 20 bp, Anaerococcus prevotii
tcggatggggactctaaaga

SEQ ID NO: 36492 - DNA, 20 bp, Clostridium ramosum
acttgtgctcgagtggcgaa

SEQ ID NO: 36493 - DNA, 20 bp, Bacteroides eggerthii
ccgataactcggggatagcc

SEQ ID NO: 36494 - DNA, 20 bp, Campylobacter rectus
tatactagttgttgcttcgc

SEQ ID NO: 36495 - DNA, 20 bp, Corynebacterium glucuronolyticum
tgtggtggaaaggtttttct

SEQ ID NO: 36496 - DNA, 20 bp, Clostridium innocuum
accatgggagtcagtaatac

SEQ ID NO: 36497 - DNA, 20 bp, Campylobacter lari
tccaacggcttaaccgttga

SEQ ID NO: 36498 - DNA, 20 bp, Streptococcus gordonii
acagtttataccgtagcttg

SEQ ID NO: 36499 - DNA, 20 bp, Prevotella bivia
gtttggtaagcgtgttgtga

SEQ ID NO: 36500 - DNA, 20 bp, Propionibacterium freudenreichii
aagcgttcagagatgggcgt

SEQ ID NO: 36501 - DNA, 20 bp, Bacteroides distasonis
acgtgttacaatggcgtgga

SEQ ID NO: 36502 - DNA, 20 bp, Leuconostoc carnosum
agacggttggttaagtctga

SEQ ID NO: 36503 - DNA, 20 bp, Fusobacterium varium
ttcagttgggaagaagtcag

SEQ ID NO: 36504 - DNA, 20 bp, Brochothrix campestris
ggtttcggctgtcactgtga

SEQ ID NO: 36505 - DNA, 20 bp, Listeria monocytogenes
ctaataccgaatgataaagt

SEQ ID NO: 36506 - DNA, 20 bp, Paenibacillus azotofixans
caagggatgggcctgcggcg

SEQ ID NO: 36507 - DNA, 20 bp, Delftia acidovorans
gttgggaattagttttctca

SEQ ID NO: 36508 - DNA, 20 bp, Brevibacillus choshinensis
taggagctctcttcggagca

SEQ ID NO: 36509 - DNA, 20 bp, Bacillus fusiformis
aactggctgtaccttgacgg

SEQ ID NO: 36510 - DNA, 20 bp, Bacillus lentus
atgctggcaactagaaccaa

SEQ ID NO: 36511 - DNA, 20 bp, Turicella otitidis
taccggataggagccatttt

SEQ ID NO: 36512 - DNA, 20 bp, Neisseria subflava
agaaaaggatagggttaata

SEQ ID NO: 36513 - DNA, 20 bp, Weissella paramesenteroides
gaacggcactgagagtaact

SEQ ID NO: 36514 - DNA, 20 bp, Prevotella melaninogenica
tttatcggtaatggatgggg

SEQ ID NO: 36515 - DNA, 20 bp, Haemophilus segnis
aatagactaggtgattgacg

SEQ ID NO: 36516 - DNA, 20 bp, Bacillus coagulans
gccgcgtgagtgaagaaggc

SEQ ID NO: 36517 - DNA, 20 bp, Peptostreptococcus anaerobius
agatatatcaaagtgttagc

SEQ ID NO: 36518 - DNA, 20 bp, Enterococcus cecorum
gagagtggaaagttcatccc

SEQ ID NO: 36519 - DNA, 20 bp, Oligella ureolytica
tcaacgaagaaaagtcttag

SEQ ID NO: 36520 - DNA, 20 bp, Helcococcus ovis
gtttcttcggaaacttgtat

SEQ ID NO: 36521 - DNA, 20 bp, Bacillus schlegellii
ataacaccgggaaaccgggc

SEQ ID NO: 36522 - DNA, 20 bp, Providencia rettgeri
aatggcatctaagactggtc

SEQ ID NO: 36523 - DNA, 20 bp, Alicyclobacillus acidocaldarius
cggcactggggtgtgtcccc

SEQ ID NO: 36524 - DNA, 20 bp, Acinetobacter radioresistens
ggccttgacatacagagaaa

SEQ ID NO: 36525 - DNA, 20 bp, Tetragenococcus halophilus
gcttaagaagaaacttcggt

SEQ ID NO: 36526 - DNA, 20 bp, Fusobacterium mortiferum
ttcgtatgttgccatcatta

SEQ ID NO: 36527 - DNA, 20 bp, Staphylococcus carnosus
gaaccgcatggttctgcaat

SEQ ID NO: 36528 - DNA, 20 bp, Corynebacterium accolens
aggtgtgagggtctttctac

SEQ ID NO: 36529 - DNA, 20 bp, Haemophilus actinemycetemcomitans
gcgtatacagagggtaacca

SEQ ID NO: 36530 - DNA, 20 bp, Vibrio cholerae
aggtcccctgctttgctctt

SEQ ID NO: 36531 - DNA, 20 bp, Alcaligenes faecalis
acctcctaatacgaggtact

SEQ ID NO: 36532 - DNA, 20 bp, Corynebacterium group F
tttggatattgttgtggaaa

SEQ ID NO: 36533 - DNA, 20 bp, Streptococcus bovis
aagtagaacgctgactactt

SEQ ID NO: 36534 - DNA, 20 bp, Sporosarcina ureae
atgccgcgtgagtgaagaag

SEQ ID NO: 36535 - DNA, 20 bp, Campylobacter sputorum
catatacaataagacgcaat

SEQ ID NO: 36536 - DNA, 20 bp, Tetragenococcus halophilus
aggaaatgctttttctatga

SEQ ID NO: 36537 - DNA, 20 bp, Prevotella loescheii
agggtgaaaccggtgattgg

SEQ ID NO: 36538 - DNA, 20 bp, Chromobacterium violaceum
aagacctcgcgttatacgag

SEQ ID NO: 36539 - DNA, 20 bp, Kytococcus sedentarius
atacgtgtaagtaactatgc

SEQ ID NO: 36540 - DNA, 20 bp, Lactobacillus acidophilus
cttcggtgatgacgttggga

SEQ ID NO: 36541 - DNA, 20 bp, Bacteroides distasonis
tcccgcatgggaatatttgc

SEQ ID NO: 36542 - DNA, 20 bp, Bacteroides fragilis
atccaacctgccctttactc

SEQ ID NO: 36543 - DNA, 20 bp, Stenotrophomonas maltophilia
tactgggcgactagaatgtg

SEQ ID NO: 36544 - DNA, 20 bp, Paenibacillus macerans
gtgcttgcactcctgagagt

SEQ ID NO: 36545 - DNA, 20 bp, Brevibacterium linens
aacctgcccccgacttcggg

SEQ ID NO: 36546 - DNA, 20 bp, Prevotella intermedia
tagcgcctggcgttagcggc

SEQ ID NO: 36547 - DNA, 20 bp, Plesiomonas shigelloides
tcatgctatcggatgaaccc

SEQ ID NO: 36548 - DNA, 20 bp, Achromobacter xylosoxidans
cccgcggaactgacggtacc

SEQ ID NO: 36549 - DNA, 20 bp, Gemella morbillorum
aatggatatgtagtaactat

SEQ ID NO: 36550 - DNA, 20 bp, Dermacoccus nishinomiyaensis
aaagtttttgtggtggggga

SEQ ID NO: 36551 - DNA, 20 bp, Myroides odoratimimus
attcggattaatgctccatg

SEQ ID NO: 36552 - DNA, 20 bp, Acinetobacter junii
tgcaccttatcttagcggcg

SEQ ID NO: 36553 - DNA, 20 bp, Listeria monocytogenes
gccacgcttttgaaagatgg

SEQ ID NO: 36554 - DNA, 20 bp, Bacteroides uniformis
gatgactcggggatagcctt

SEQ ID NO: 36555 - DNA, 20 bp, Bacteroides fragilis
gtacagaaggcagctagcgg

SEQ ID NO: 36556 - DNA, 20 bp, Bacteroides fragilis
gtattatatgaataaggatc

SEQ ID NO: 36557 - DNA, 20 bp, Clostridium ramosum
catggtgaccgtattaaaag

SEQ ID NO: 36558 - DNA, 20 bp, Anaerobiospirillum succiniciproducens
agggaaacgataccgtgagg

SEQ ID NO: 36559 - DNA, 20 bp, Streptococcus thermophilus
taataccgcataacaatgga

SEQ ID NO: 36560 - DNA, 20 bp, Gemella morbillorum
ttaaaagttggttatgctaa

SEQ ID NO: 36561 - DNA, 20 bp, Clostridium ramosum
taagtaacctgccctagaca

SEQ ID NO: 36562 - DNA, 20 bp, Corynebacterium amycolatum
caccatcgacgaagggtttc

SEQ ID NO: 36563 - DNA, 20 bp, Prevotella intermedia
gcactcaagtcctacagttc

SEQ ID NO: 36564 - DNA, 20 bp, Vibrio cholerae
ctctagcttgtcagtttcaa

SEQ ID NO: 36565 - DNA, 20 bp, Paenibacillus larvae
cgggataacttgcggaaacg

SEQ ID NO: 36566 - DNA, 20 bp, Prevotella loescheii
acccgggcttgaactgcggc

SEQ ID NO: 36567 - DNA, 20 bp, Propionibacterium acnes
tgtgcctcttttggggtcgg

SEQ ID NO: 36568 - DNA, 20 bp, Anaerococcus prevotii
cccttcggggtgaagataag

SEQ ID NO: 36569 - DNA, 20 bp, Streptococcus sanguinis
ttaattgaaaggtgcaattg

SEQ ID NO: 36570 - DNA, 20 bp, Fusobacterium varium
gagagctgcaaacctgcgag

SEQ ID NO: 36571 - DNA, 20 bp, Propionibacterium freudenreichii
tcccgaatatgagcctggcc

SEQ ID NO: 36572 - DNA, 20 bp, Tissierella praeacuta
tgacatgcccctgaccgtcc

SEQ ID NO: 36573 - DNA, 20 bp, Actinomyces radingae
gagatgggctcgcggcttat

SEQ ID NO: 36574 - DNA, 20 bp, Prevotella melaninogenica
tgagtacgcacaacgttggc

SEQ ID NO: 36575 - DNA, 20 bp, Propionibacterium freudenreichii
gcttaactctgggcttgctt

SEQ ID NO: 36576 - DNA, 20 bp, Enterococcus saccharolyticus
gagaatgttcatcccttgac

SEQ ID NO: 36577 - DNA, 20 bp, Campylobacter concisus
gacatacaccggaccgggcc

SEQ ID NO: 36578 - DNA, 20 bp, Streptococcus parasanguinis
ccgcataaaagtcgacattg

SEQ ID NO: 36579 - DNA, 20 bp, Oligella ureolytica
ctaataccttaagatgctga

SEQ ID NO: 36580 - DNA, 20 bp, Moraxella bovis
cttcgggagcttggatacag

SEQ ID NO: 36581 - DNA, 20 bp, Dolosigranulum pigrum
tgagcgggggacaacattcg

SEQ ID NO: 36582 - DNA, 20 bp, Capnocytophaga ochracea
tctgcctttcactgggggat

SEQ ID NO: 36583 - DNA, 20 bp, Streptococcus pyogenes
gtggaaaatccaccaagtga

SEQ ID NO: 36584 - DNA, 20 bp, Streptococcus uberis
aaaaggggcaaatgcttcac

SEQ ID NO: 36585 - DNA, 20 bp, Virgibacillus pantothenticus
gcatatgctgtcacttacag

SEQ ID NO: 36586 - DNA, 20 bp, Leptotrichia buccalis
ttgacatcctacgaatgcct

SEQ ID NO: 36587 - DNA, 20 bp, Oligella urethralis
gtattagcctaagacttttc

SEQ ID NO: 36588 - DNA, 20 bp, Bacillus megaterium
gggagatgattgaaagatgg

SEQ ID NO: 36589 - DNA, 20 bp, Fusobacterium mortiferum
ggaaactgccaaactagagt

SEQ ID NO: 36590 - DNA, 20 bp, Fusobacterium mortiferum
gttgggacgaagtaagtgac

SEQ ID NO: 36591 - DNA, 20 bp, Bacteroides stercoris
cacggcgacgtggtgctaat

SEQ ID NO: 36592 - DNA, 20 bp, Actinomyces naeslundii
gcatggtgggcctgggaaag

SEQ ID NO: 36593 - DNA, 20 bp, Tissierella praeacuta
ccttcgggtacaggggacac

SEQ ID NO: 36594 - DNA, 20 bp, Tissierella praeacuta
gcgaagtttttaaagaagat

SEQ ID NO: 36595 - DNA, 20 bp, Streptococcus porcinus
atccttctgaccggcctaga

SEQ ID NO: 36596 - DNA, 20 bp, Bacteroides forsythus
acctcataaaacaggggttc

SEQ ID NO: 36597 - DNA, 20 bp, Anaerobiospirillum succiniciproducens
gggttccgcagctaacgcga

SEQ ID NO: 36598 - DNA, 20 bp, Gemella haemolysans
gaaaaacttagcggcgaacg

SEQ ID NO: 36599 - DNA, 20 bp, Prevotella bivia
cgtgttgtgaaatgtaggag

SEQ ID NO: 36600 - DNA, 20 bp, Paenibacillus azotofixans
ggaaactggacagcttgagt

SEQ ID NO: 36601 - DNA, 20 bp, Porphyromonas endodontalis
ctcaactgtagtcttgccgt

SEQ ID NO: 36602 - DNA, 20 bp, Chromobacterium violaceum
taatgcgtcggaatgtaccg

SEQ ID NO: 36603 - DNA, 20 bp, Vibrio hollisae
cctcacgctattcgagcggc

SEQ ID NO: 36604 - DNA, 20 bp, Gemella bergeri
caggtggtttagaaagtctg

SEQ ID NO: 36605 - DNA, 20 bp, Brochothrix campestris
tttggtaaccttcgggagct

SEQ ID NO: 36606 - DNA, 20 bp, Tissierella praeacuta
tttcttcggaatgaaacttt

SEQ ID NO: 36607 - DNA, 20 bp, Anaerococcus prevotii
acatactgaggaccggtata

SEQ ID NO: 36608 - DNA, 20 bp, Proteus vulgaris
atctgaaactggttggctag

SEQ ID NO: 36609 - DNA, 20 bp, Pediococcus pentosaceus
ccagtgacggtatttaacca

SEQ ID NO: 36610 - DNA, 20 bp, Campylobacter lari
gtcttttgtgaaatctaaca

SEQ ID NO: 36611 - DNA, 20 bp, Streptococcus porcinus
ctttctcttcggagcagaag

SEQ ID NO: 36612 - DNA, 20 bp, Aerococcus viridans
ggaatctacctataagcggg

SEQ ID NO: 36613 - DNA, 20 bp, Peptostreptococcus anaerobius
aatgacggtaccctgtgagg

SEQ ID NO: 36614 - DNA, 20 bp, Streptococcus equi
gcaacagctccactatgaga

SEQ ID NO: 36615 - DNA, 20 bp, Bacteroides thetaiotaomicron
tgttattaaagaatttcggt

SEQ ID NO: 36616 - DNA, 20 bp, Lactococcus garvieae
gcaaggagggcgcttcctaa

SEQ ID NO: 36617 - DNA, 20 bp, Oligella urethralis
tcctcaactaccgtcagcat

SEQ ID NO: 36618 - DNA, 20 bp, Clostridium glycolicum
agccaagtcgtgaggccgag

SEQ ID NO: 36619 - DNA, 20 bp, Nocardia asteroides
agcgggggaggttgcttcgg

SEQ ID NO: 36620 - DNA, 20 bp, Clostridium limosum
ctaggtgtcggggtttcaat

SEQ ID NO: 36621 - DNA, 20 bp, Actinomyces bovis
gggaatgcttcttatatgac

SEQ ID NO: 36622 - DNA, 20 bp, Abiotrophia defectiva
gtaactgttatgcgtgtgac

SEQ ID NO: 36623 - DNA, 20 bp, Pseudomonas fluorescens
cctaatacgtgagtattttg

SEQ ID NO: 36624 - DNA, 20 bp, Cardiobacterium hominis
atttgaaactgggcgactag

SEQ ID NO: 36625 - DNA, 20 bp, Brevundimonas vesicularis
tgagtatgagagaggtgtgt

SEQ ID NO: 36626 - DNA, 20 bp, Pediococcus dextrinicus
catctagcgccaatcctaga

SEQ ID NO: 36627 - DNA, 20 bp, Gemella bergeri
aattcttagcggcgaacggg

SEQ ID NO: 36628 - DNA, 20 bp, Bacillus fusiformis
cgataaagtcgttctcagtt

SEQ ID NO: 36629 - DNA, 20 bp, Photobacterium damselae
taacacctgcattatttgac

SEQ ID NO: 36630 - DNA, 20 bp, Facklamia ignava
atcctacgggacaagaagac

SEQ ID NO: 36631 - DNA, 20 bp, Gemella sanguinis
gcctcatagacggggacaac

SEQ ID NO: 36632 - DNA, 20 bp, Porphyromonas endodontalis
gcgaggaaggggcggatgac

SEQ ID NO: 36633 - DNA, 20 bp, Leuconostoc lactis
agaagaatgtatctgatagt

SEQ ID NO: 36634 - DNA, 20 bp, Streptococcus constellatus
ccgtagtttactacaccgta

SEQ ID NO: 36635 - DNA, 20 bp, Veillonella sp.
gtaagctatcactgaaggag

SEQ ID NO: 36636 - DNA, 20 bp, Haemophilus segnis
ccagagaacattccagagat

SEQ ID NO: 36637 - DNA, 20 bp, Photobacterium damselae
ggcagcgacttaactgaacc

SEQ ID NO: 36638 - DNA, 20 bp, Corynebacterium falsenii
ggcataactggagtgctgta

SEQ ID NO: 36639 - DNA, 20 bp, Acinetobacter junii
ggtgcttgcaccttatctta

SEQ ID NO: 36640 - DNA, 20 bp, Bacteroides merdae
atggccgagaggctgaacca

SEQ ID NO: 36641 - DNA, 20 bp, Leptotrichia buccalis
gtgtgcacgaagaaggtttt

SEQ ID NO: 36642 - DNA, 20 bp, Tetragenococcus halophilus
agaacaggagaaagaggaaa

SEQ ID NO: 36643 - DNA, 20 bp, Pseudoramibacter alactolyticus
gttattggggaagaaaacat

SEQ ID NO: 36644 - DNA, 20 bp, Propionibacterium avidum
gcttcggcggttttggatgg

SEQ ID NO: 36645 - DNA, 20 bp, Acinetobacter genospecies 3
ctggcctaacactgacgctg

SEQ ID NO: 36646 - DNA, 20 bp, Anaerococcus prevotii
attaaaaagaataccggtgg

SEQ ID NO: 36647 - DNA, 20 bp, Streptococcus pyogenes
catgttagtaatttaaaagg

SEQ ID NO: 36648 - DNA, 20 bp, Anaerobiospirillum succiniciproducens
tgtaggcggaaaggtaagta

SEQ ID NO: 36649 - DNA, 20 bp, Paenibacillus apiarius
gatgtaagttgggtgtttaa

SEQ ID NO: 36650 - DNA, 20 bp, Bacillus lentus
gggcggtcaggagatgtcaa

SEQ ID NO: 36651 - DNA, 20 bp, Streptococcus infantarius
cgcaactcttcaaactttag

SEQ ID NO: 36652 - DNA, 20 bp, Campylobacter concisus
aggcccaagcttgcttgggt

SEQ ID NO: 36653 - DNA, 20 bp, Helcococcus kunzii
caagttgaacgagaattttt

SEQ ID NO: 36654 - DNA, 20 bp, Clostridium clostridiiforme
gagcgtagacggttaagcaa

SEQ ID NO: 36655 - DNA, 20 bp, Clostridium tetani
tcgtaaaaccctgttttctg

SEQ ID NO: 36656 - DNA, 20 bp, Fusobacterium mortiferum
gaagccagcccactggacag

SEQ ID NO: 36657 - DNA, 20 bp, Methylobacterium mesophilicum
tgcttgcaccgcagtagcgc

SEQ ID NO: 36658 - DNA, 20 bp, Tissierella praeacuta
aagcggtaaaagatggtctc

SEQ ID NO: 36659 - DNA, 20 bp, Anaerococcus tetradius
ctcaactatataaagctttt

SEQ ID NO: 36660 - DNA, 20 bp, Acinetobacter calcoaceticus
actgaagttaataccttcag

SEQ ID NO: 36661 - DNA, 20 bp, Burkholderia gladioli
tccttcggggatgacggtac

SEQ ID NO: 36662 - DNA, 20 bp, Oligella urethralis
acacgcgagatggctcgatc

SEQ ID NO: 36663 - DNA, 20 bp, Atopobium parvulum
tttaggagggagacgccgaa

SEQ ID NO: 36664 - DNA, 20 bp, Propionibacterium granulosum
aattcggttggggactcagt

SEQ ID NO: 36665 - DNA, 20 bp, Facklamia sourekii
cagcgaagtcgtgaggccaa

SEQ ID NO: 36666 - DNA, 20 bp, Clostridium innocuum
tcagtaatacccgaagccgg

SEQ ID NO: 36667 - DNA, 20 bp, Clostridium clostridiiforme
tactaggtgtcgggggacaa

SEQ ID NO: 36668 - DNA, 20 bp, Corynebacterium ulcerans
agggtcttccacgactttcg

SEQ ID NO: 36669 - DNA, 20 bp, Methylobacterium mesophilicum
cgcagtagcgcagctaacgc

SEQ ID NO: 36670 - DNA, 20 bp, Pasteurella multocida
ggcatcattgacgttaatta

SEQ ID NO: 36671 - DNA, 20 bp, Staphylococcus sciuri
cgaatccgcgaggccaagca

SEQ ID NO: 36672 - DNA, 20 bp, Clostridium subterminale
cgtgcctaacacatgcaagt

SEQ ID NO: 36673 - DNA, 20 bp, Sphingomonas paucimobilis
agagatgcctttcttccctt

SEQ ID NO: 36674 - DNA, 20 bp, Bacillus alcalophilus
ggttcttttgtaaaagatgg

SEQ ID NO: 36675 - DNA, 20 bp, Bacillus oleronius
cctcttgacctccctagaga

SEQ ID NO: 36676 - DNA, 20 bp, Corynebacterium macginleyi
cgcgttgcgacactgtgagg

SEQ ID NO: 36677 - DNA, 20 bp, Peptostreptococcus anaerobius
atactgaaaagtttactaat

SEQ ID NO: 36678 - DNA, 20 bp, Pasteurella multocida
gcagcgagagtgcgagcttg

SEQ ID NO: 36679 - DNA, 20 bp, Moraxella atlantae
ctgacactcagacccgaaag

SEQ ID NO: 36680 - DNA, 20 bp, Streptococcus dysgalactiae
aactgcatcactatgagatg

SEQ ID NO: 36681 - DNA, 20 bp, Anaerobiospirillum succiniciproducens
gaatgcgtagatatctgaaa

SEQ ID NO: 36682 - DNA, 20 bp, Facklamia sourekii
gataggtgaaatcctacggg

SEQ ID NO: 36683 - DNA, 20 bp, Facklamia languida
actaataccgcatagaatca

SEQ ID NO: 36684 - DNA, 20 bp, Bacteroides vulgatus
caatccccaaaacctctctc

SEQ ID NO: 36685 - DNA, 20 bp, Veillonella atypica
tacaatgggagttaatagac

SEQ ID NO: 36686 - DNA, 20 bp, Acinetobacter radioresistens
tgaaggtagcttgctactgg

SEQ ID NO: 36687 - DNA, 20 bp, Helcococcus kunzii
gcaagccctggctaaatacg

SEQ ID NO: 36688 - DNA, 20 bp, Campylobacter curvus
agttgttgctaagctagtct

SEQ ID NO: 36689 - DNA, 20 bp, Bacteroides distasonis
tgaagtccgtaaccgaaagg

SEQ ID NO: 36690 - DNA, 20 bp, Campylobacter sputorum
gtctcttgtgaaatctagta

SEQ ID NO: 36691 - DNA, 20 bp, Staphylococcus pulvereri
gtggagtaaccttttattag

SEQ ID NO: 36692 - DNA, 20 bp, Bacteroides capilosus
gctgccaaagatttatcgct

SEQ ID NO: 36693 - DNA, 20 bp, Tetragenococcus halophilus
ggtgctaataccgcatatgg

SEQ ID NO: 36694 - DNA, 20 bp, Moraxella lacunata
agcgtaggtggtcatttaag

SEQ ID NO: 36695 - DNA, 20 bp, Proteus vulgaris
acctttgtcaattgacgtta

SEQ ID NO: 36696 - DNA, 20 bp, Kocuria kristinae
accggatcgttccagagatg

SEQ ID NO: 36697 - DNA, 20 bp, Micrococcus luteus
taccggataggagcgcccac

SEQ ID NO: 36698 - DNA, 20 bp, Campylobacter sputorum
catcctttgacccttctaga

SEQ ID NO: 36699 - DNA, 20 bp, Fusobacterium mortiferum
tcgtatgttgccatcattaa

SEQ ID NO: 36700 - DNA, 20 bp, Streptococcus constellatus
cataagaacatttactgcat

SEQ ID NO: 36701 - DNA, 20 bp, Comamonas terrigena
ataccctggagtcatgacgg

SEQ ID NO: 36702 - DNA, 20 bp, Clostridium sordellii
gtctttcaagccagaagtga

SEQ ID NO: 36703 - DNA, 20 bp, Oligella ureolytica
gctaataccttaagatgctg

SEQ ID NO: 36704 - DNA, 20 bp, Staphylococcus sp.
cttacacgtatgttcttccc

SEQ ID NO: 36705 - DNA, 20 bp, Staphylococcus capitis
gagatacgtcctcccttgtg

SEQ ID NO: 36706 - DNA, 20 bp, Bacteroides ureolyticus
gttgctttgctagtcaaggc

SEQ ID NO: 36707 - DNA, 20 bp, Neisseria lactamica
cggttttgacatgtacggaa

SEQ ID NO: 36708 - DNA, 20 bp, Oligella urethralis
taccgtcagcatcttaaggt

SEQ ID NO: 36709 - DNA, 20 bp, Actinomyces bovis
cgtgcgaaggtaggatcgat

SEQ ID NO: 36710 - DNA, 20 bp, Actinomyces bovis
tgcgcgcaagcgtaaaactc

SEQ ID NO: 36711 - DNA, 20 bp, Bacillus coagulans
tctgttgccggggaagaaca

SEQ ID NO: 36712 - DNA, 20 bp, Staphylococcus muscae
gaccgcactagagatagtgt

SEQ ID NO: 36713 - DNA, 20 bp, Tissierella praeacuta
tttaaagaagatttcttcgg

SEQ ID NO: 36714 - DNA, 20 bp, Streptococcus sobrinus
ggcttcactatcagatggac

SEQ ID NO: 36715 - DNA, 20 bp, Streptococcus dysgalactiae
aacgctgaggactggtgctt

SEQ ID NO: 36716 - DNA, 20 bp, Lactococcus garvieae
cgcttcctaaggtaagaccg

SEQ ID NO: 36717 - DNA, 20 bp, Corynebacterium afermentans
catgcggtcgcagctcgtat

SEQ ID NO: 36718 - DNA, 20 bp, Moraxella lacunata
tagttaccagcgatttaagt

SEQ ID NO: 36719 - DNA, 20 bp, Bacillus lentus
gtccgccgctaaccaacaaa

SEQ ID NO: 36720 - DNA, 20 bp, Corynebacterium glucuronolyticum
tcgtggttggtgtggtggaa

SEQ ID NO: 36721 - DNA, 20 bp, Actinomyces turicensis
ggttggtacagagtgttgcg

SEQ ID NO: 36722 - DNA, 20 bp, Staphylococcus capitis
ctgcagcttgctgcgggtac

SEQ ID NO: 36723 - DNA, 20 bp, Vibrio cholerae
caaatgattaaggtattaac

SEQ ID NO: 36724 - DNA, 20 bp, Propionibacterium freudenreichii
aactggtggtaatcccgaat

SEQ ID NO: 36725 - DNA, 20 bp, Tissierella praeacuta
acctgccttttacaaaggga

SEQ ID NO: 36726 - DNA, 20 bp, Helcococcus kunzii
tatcctagagataggatagt

SEQ ID NO: 36727 - DNA, 20 bp, Leuconostoc argentinum
gttgtagaggtaagtggaac

SEQ ID NO: 36728 - DNA, 20 bp, Anaerobiospirillum succiniciproducens
ggcgtacagagggaaacgat

SEQ ID NO: 36729 - DNA, 20 bp, Acinetobacter haemolyticus
ggaggaggctactctagtta

SEQ ID NO: 36730 - DNA, 20 bp, Prevotella oris
gagcgtaggccgtggattaa

SEQ ID NO: 36731 - DNA, 20 bp, Alicyclobacillus acidocaldarius
tacgagcggctttttgggtt

SEQ ID NO: 36732 - DNA, 20 bp, Clostridium ramosum
cggacactgcatggtgaccg

SEQ ID NO: 36733 - DNA, 20 bp, Anaerococcus prevotii
tcttgacatattacggcggg

SEQ ID NO: 36734 - DNA, 20 bp, Prevotella loescheii
tagggtgaaaccggtgattg

SEQ ID NO: 36735 - DNA, 20 bp, Corynebacterium propinquum
ccggtacaatgcgcagcgag

SEQ ID NO: 36736 - DNA, 20 bp, Clostridium cadaveris
ggtgtaggggtttcgatacc

SEQ ID NO: 36737 - DNA, 20 bp, Porphyromonas endodontalis
ttcttttgtagaggaataat

SEQ ID NO: 36738 - DNA, 20 bp, Cardiobacterium hominis
cctgcgcaattgacgttacc

SEQ ID NO: 36739 - DNA, 20 bp, Microbacterium hominis
ggatatgagctgcgatcgca

SEQ ID NO: 36740 - DNA, 20 bp, Facklamia ignava
aggtttgacggtaactgatc

SEQ ID NO: 36741 - DNA, 20 bp, Streptococcus hyovaginalis
tgacatcccagtgaccatcc

SEQ ID NO: 36742 - DNA, 20 bp, Prevotella bivia
ctacccataactaagggata

SEQ ID NO: 36743 - DNA, 20 bp, Vagococcus fluvialis
aaatcaaagagtggcggacg

SEQ ID NO: 36744 - DNA, 20 bp, Clostridium cadaveris
gggtttcgatacctctgtgc

SEQ ID NO: 36745 - DNA, 20 bp, Chryseobacterium meningosepticum
ggggataaacctacttacgt

SEQ ID NO: 36746 - DNA, 20 bp, Actinomyces radingae
gagagggtgggcggtcacat

SEQ ID NO: 36747 - DNA, 20 bp, Tetragenococcus halophilus
tgctaataccgcatatggct

SEQ ID NO: 36748 - DNA, 20 bp, Vibrio hollisae
ctattcgagcggccgacgtc

SEQ ID NO: 36749 - DNA, 20 bp, Pseudomonas fluorescens
aggaagggtacttacctaat

SEQ ID NO: 36750 - DNA, 20 bp, Moraxella lacunata
gtaggtggtcatttaagtca

SEQ ID NO: 36751 - DNA, 20 bp, Prevotella bivia
ataaagatttatcggttatg

SEQ ID NO: 36752 - DNA, 20 bp, Nocardia asteroides
gggaggttgcttcggtaact

SEQ ID NO: 36753 - DNA, 20 bp, Prevotella corporis
cggacactgccgccgcaagg

SEQ ID NO: 36754 - DNA, 20 bp, Actinomyces odontolyticus
cagagatgtggtggcattta

SEQ ID NO: 36755 - DNA, 20 bp, Streptococcus anginosus
agttcatactgtgacggtac

SEQ ID NO: 36756 - DNA, 20 bp, Ralstonia paucula
ggaaagaaattgctctggct

SEQ ID NO: 36757 - DNA, 20 bp, Bacteroides stercoris
ccatcaggtcatgctgggga

SEQ ID NO: 36758 - DNA, 20 bp, Streptococcus thermophilus
acgctgaagagaggagcttg

SEQ ID NO: 36759 - DNA, 20 bp, Streptococcus thermophilus
gacacatgtcatttatttga

SEQ ID NO: 36760 - DNA, 20 bp, Corynebacterium glucuronolyticum
gtttttttgacggtacctgg

SEQ ID NO: 36761 - DNA, 20 bp, Brochothrix campestris
atcgatgctaataccgaatg

SEQ ID NO: 36762 - DNA, 20 bp, Fusobacterium mortiferum
catcctaagaaattagcaga

SEQ ID NO: 36763 - DNA, 20 bp, Bacteroides distasonis
cacagcgaaagcgttaagtg

SEQ ID NO: 36764 - DNA, 20 bp, Bacteroides distasonis
gtccgtaaccgaaaggatcg

SEQ ID NO: 36765 - DNA, 20 bp, Moraxella lacunata
cttagttaccagcgatttaa

SEQ ID NO: 36766 - DNA, 20 bp, Bacteroides fragilis
cgtaaacttcttttatataa

SEQ ID NO: 36767 - DNA, 20 bp, Streptococcus anginosus
gcataacagtatgtaacaca

SEQ ID NO: 36768 - DNA, 20 bp, Facklamia ignava
actggtcaacttgagtacag

SEQ ID NO: 36769 - DNA, 20 bp, Granulicatella elegans
aacgagagcgaccggtgctt

SEQ ID NO: 36770 - DNA, 20 bp, Kocuria kristinae
actggtcttagatgggctca

SEQ ID NO: 36771 - DNA, 20 bp, Brevibacillus choshinensis
aagacctttggtcacgtaca

SEQ ID NO: 36772 - DNA, 20 bp, Streptococcus constellatus
accgtataagaacatttact

SEQ ID NO: 36773 - DNA, 20 bp, Alicyclobacillus acidocaldarius
caagaagatgcctcctcgcg

SEQ ID NO: 36774 - DNA, 20 bp, Clostridium clostridiiforme
tttgacttgagtgcaggaga

SEQ ID NO: 36775 - DNA, 20 bp, Haemophilus haemolyticus
agggtggcgaaactgcgagg

SEQ ID NO: 36776 - DNA, 20 bp, Granulicatella adiacens
caatctagtggcgaacgggt

SEQ ID NO: 36777 - DNA, 20 bp, Weeksella virosa
atcctatcgcttaacgatag

SEQ ID NO: 36778 - DNA, 20 bp, Wolinella succinogenes
attcaaccaaaggagcaatc

SEQ ID NO: 36779 - DNA, 20 bp, Campylobacter sputorum
acttagaaatgagtgctaat

SEQ ID NO: 36780 - DNA, 20 bp, Brevibacillus parabrevis
gtttttggattgcatgatcc

SEQ ID NO: 36781 - DNA, 20 bp, Gemella bergeri
aacacctgaagacggtgacc

SEQ ID NO: 36782 - DNA, 20 bp, Porphyromonas levii
ttctgagagggatgtccccc

SEQ ID NO: 36783 - DNA, 20 bp, Anaerococcus prevotii
cggtatagagatataccctc

SEQ ID NO: 36784 - DNA, 20 bp, Anaerococcus tetradius
aacgacgaataataccctat

SEQ ID NO: 36785 - DNA, 20 bp, Dermabacter hominis
gcccaagctttatgcgggga

SEQ ID NO: 36786 - DNA, 20 bp, Leuconostoc lactis
aagtcgaacgcactctcgtt

SEQ ID NO: 36787 - DNA, 20 bp, Shewanella algae
ttacatctgtgacgttactc

SEQ ID NO: 36788 - DNA, 20 bp, Arcanobacterium bernardiae
gttggaaagggtttctggat

SEQ ID NO: 36789 - DNA, 20 bp, Anaerococcus tetradius
tttaaaactgctcatcttga

SEQ ID NO: 36790 - DNA, 20 bp, Methylobacterium mesophilicum
tgcaccgcagtagcgcagct

SEQ ID NO: 36791 - DNA, 20 bp, Myroides odoratus
agaccggcggatgggtgagt

SEQ ID NO: 36792 - DNA, 20 bp, Facklamia hominis
ctaataccgcatagaatcgc

SEQ ID NO: 36793 - DNA, 20 bp, Staphylococcus carnosus
tgcaatgaaagacggttttg

SEQ ID NO: 36794 - DNA, 20 bp, Clostridium botulinum
tataagagaatcgcatgatt

SEQ ID NO: 36795 - DNA, 20 bp, Corynebacterium falsenii
ttcgctagggaagaagccac

SEQ ID NO: 36796 - DNA, 20 bp, Pasteurella trehalosi
taaacgatgttgatttgggg

SEQ ID NO: 36797 - DNA, 20 bp, Oligella ureolytica
cggcttagtagcgcagctaa

SEQ ID NO: 36798 - DNA, 20 bp, Cellulosimicrobium cellulans
tccggtaacacccgaagccc

SEQ ID NO: 36799 - DNA, 20 bp, Pseudoramibacter alactolyticus
caagatcatgaaaactccgg

SEQ ID NO: 36800 - DNA, 20 bp, Propionibacterium freudenreichii
tttatgcggtcagggatcgt

SEQ ID NO: 36801 - DNA, 20 bp, Paenibacillus apiarius
gtaagttgggtgtttaaacc

SEQ ID NO: 36802 - DNA, 20 bp, Bacteroides forsythus
tcgcttaacgataaaattgc

SEQ ID NO: 36803 - DNA, 20 bp, Granulicatella elegans
agcgaccggtgcttgcactg

SEQ ID NO: 36804 - DNA, 20 bp, Corynebacterium jeikeium
gggttttatttacgattccc

SEQ ID NO: 36805 - DNA, 20 bp, Atopobium parvulum
ggaaacgtcgtggccgaaag

SEQ ID NO: 36806 - DNA, 20 bp, Bacillus flexus
gcgaactgattagaagcttg

SEQ ID NO: 36807 - DNA, 20 bp, Actinomyces turicensis
agccgcagctttgggttgtg

SEQ ID NO: 36808 - DNA, 20 bp, Tetragenococcus halophilus
tcactgatggctggtcccgc

SEQ ID NO: 36809 - DNA, 20 bp, Alcaligenes faecalis
actagctgttggggccgtta

SEQ ID NO: 36810 - DNA, 20 bp, Kingella kingae
agaaaaggttgatgctaata

SEQ ID NO: 36811 - DNA, 20 bp, Kingella kingae
taccgcatacgctttgagaa

SEQ ID NO: 36812 - DNA, 20 bp, Prevotella intermedia
ttcactttctggcttgaaag

SEQ ID NO: 36813 - DNA, 20 bp, Moraxella lacunata
gcgatttaagtcgggaactc

SEQ ID NO: 36814 - DNA, 20 bp, Propionibacterium propionicus
aagcttttgtgacggtagtg

SEQ ID NO: 36815 - DNA, 20 bp, Atopobium parvulum
cagggacgaggcgaaagtga

SEQ ID NO: 36816 - DNA, 20 bp, Facklamia ignava
gctcaaccgtggagttgcat

SEQ ID NO: 36817 - DNA, 20 bp, Ralstonia paucula
attgctctggctaatacctg

SEQ ID NO: 36818 - DNA, 20 bp, Weeksella virosa
caccaagtcgatgatcttta

SEQ ID NO: 36819 - DNA, 20 bp, Campylobacter curvus
atttgacggtacccaaggaa

SEQ ID NO: 36820 - DNA, 20 bp, Clostridium innocuum
tggagtgcagaagagggcga

SEQ ID NO: 36821 - DNA, 20 bp, Campylobacter lari
tgttagggaagaaccatgac

SEQ ID NO: 36822 - DNA, 20 bp, Fusobacterium mortiferum
ttggagcaatctgagtggct

SEQ ID NO: 36823 - DNA, 20 bp, Streptococcus agalactiae
gtttggtgtttacactagac

SEQ ID NO: 36824 - DNA, 20 bp, Paenibacillus pabuli
cggtacaacgggctgtgaag

SEQ ID NO: 36825 - DNA, 20 bp, Paenibacillus validus
ttcgcactgaaaactgggag

SEQ ID NO: 36826 - DNA, 20 bp, Haemophilus influenzae
ttaaccttttggagggcgtt

SEQ ID NO: 36827 - DNA, 20 bp, Eggerthella lenta
cgatgaaaccgccctcgggc

SEQ ID NO: 36828 - DNA, 20 bp, Aneurinibacillus thermoaerophilus
ggatgacctcccggtctgac

SEQ ID NO: 36829 - DNA, 20 bp, Propionibacterium freudenreichii
gtgcctttttggctggtaca

SEQ ID NO: 36830 - DNA, 20 bp, Clostridium glycolicum
ccaagtcgtgaggccgagct

SEQ ID NO: 36831 - DNA, 20 bp, Acinetobacter baumannii
tactggacctagcggcggac

SEQ ID NO: 36832 - DNA, 20 bp, Shewanella algae
aagttaataccttacatctg

SEQ ID NO: 36833 - DNA, 20 bp, Tetragenococcus halophilus
gcaaggcctagcgaatctct

SEQ ID NO: 36834 - DNA, 20 bp, Actinomyces bovis
cctgggataacagagggaaa

SEQ ID NO: 36835 - DNA, 20 bp, Bacillus alcalophilus
tgtagactgggataacatcg

SEQ ID NO: 36836 - DNA, 20 bp, Streptococcus thermophilus
atttatttgaaaggggcaat

SEQ ID NO: 36837 - DNA, 20 bp, Moraxella lacunata
atactgggtgactagagtag

SEQ ID NO: 36838 - DNA, 20 bp, Clostridium ramosum
ggtgaccgtattaaaagtgc

SEQ ID NO: 36839 - DNA, 20 bp, Arthrobacter globiformis
gccgcagaaatgtggtttct

SEQ ID NO: 36840 - DNA, 20 bp, Staphylococcus capitis
gtaagtgacggtacctgtat

SEQ ID NO: 36841 - DNA, 20 bp, Helcococcus ovis
cttcggaaacttgtatacag

SEQ ID NO: 36842 - DNA, 20 bp, Corynebacterium glucuronolyticum
ctataggaccgcatcgtggt

SEQ ID NO: 36843 - DNA, 20 bp, Bacillus halodurans
agcggaccaaagggagcttg

SEQ ID NO: 36844 - DNA, 20 bp, Eremococcus coleocola
caagtcgaacgcactgacgg

SEQ ID NO: 36845 - DNA, 20 bp, Gemella haemolysans
cttgacatactgtgaggaca

SEQ ID NO: 36846 - DNA, 20 bp, Haemophilus haemolyticus
gagagacgaaagtgcgggac

SEQ ID NO: 36847 - DNA, 20 bp, Streptococcus uberis
taaaaggggcaaatgcttca

SEQ ID NO: 36848 - DNA, 20 bp, Gemella bergeri
ctatacacaaaacagacggt

SEQ ID NO: 36849 - DNA, 20 bp, Clostridium clostridiiforme
ggagcgtagacggttaagca

SEQ ID NO: 36850 - DNA, 20 bp, Peptostreptococcus anaerobius
tgcaggggaagataatgacg

SEQ ID NO: 36851 - DNA, 20 bp, Prevotella oris
gggataaagtgagggacgtg

SEQ ID NO: 36852 - DNA, 20 bp, Actinomyces bovis
agccgtgcgaaggtaggatc

SEQ ID NO: 36853 - DNA, 20 bp, Moraxella osloensis
ggctaatggttaatacccat

SEQ ID NO: 36854 - DNA, 20 bp, Leptotrichia buccalis
aagagtgtccgtgccgaagc

SEQ ID NO: 36855 - DNA, 20 bp, Brevibacterium epidermidis
tgcccctgatttcgggataa

SEQ ID NO: 36856 - DNA, 20 bp, Cardiobacterium hominis
gtatgaaagaggaaagcgga

SEQ ID NO: 36857 - DNA, 20 bp, Lactobacillus casei
taaatccaagaaccgcatgg

SEQ ID NO: 36858 - DNA, 20 bp, Prevotella bivia
cttgagtgcgcacaacgtag

SEQ ID NO: 36859 - DNA, 20 bp, Streptococcus bovis
agaaggagttgcgaacgggt

SEQ ID NO: 36860 - DNA, 20 bp, Alicyclobacillus acidocaldarius
cactccagacttgctcgacc

SEQ ID NO: 36861 - DNA, 20 bp, Porphyromonas endodontalis
aagcgacatggtgacatgaa

SEQ ID NO: 36862 - DNA, 20 bp, Pediococcus inopinatus
ataaaggcccaccaaggctg

SEQ ID NO: 36863 - DNA, 20 bp, Bacteroides vulgatus
atggggggtacagagggccg

SEQ ID NO: 36864 - DNA, 20 bp, Lactococcus garvieae
actaccaaggcgatgataca

SEQ ID NO: 36865 - DNA, 20 bp, Corynebacterium group F
ttgtggtcgctatacaggtg

SEQ ID NO: 36866 - DNA, 20 bp, Pseudoramibacter alactolyticus
agtttccttcgggaacagag

SEQ ID NO: 36867 - DNA, 20 bp, Oligella urethralis
acgcgagatggctcgatcag

SEQ ID NO: 36868 - DNA, 20 bp, Bacillus pallidus
gcttttagctgtcactgcag

SEQ ID NO: 36869 - DNA, 20 bp, Streptococcus dysgalactiae
gtgcaactgcatcactatga

SEQ ID NO: 36870 - DNA, 20 bp, Kytococcus sedentarius
tacgtgtaagtaactatgca

SEQ ID NO: 36871 - DNA, 20 bp, Bacillus lentus
agggcggtcaggagatgtca

SEQ ID NO: 36872 - DNA, 20 bp, Atopobium parvulum
gcagggacgaggcgaaagtg

SEQ ID NO: 36873 - DNA, 20 bp, Prevotella melaninogenica
ccgaaaggcagactaatacc

SEQ ID NO: 36874 - DNA, 20 bp, Bacillus oleronius
acctccctagagatagggat

SEQ ID NO: 36875 - DNA, 20 bp, Alicyclobacillus acidocaldarius
ggggtgtgtccccccaacac

SEQ ID NO: 36876 - DNA, 20 bp, Brevibacillus agri
atggcttttcgctatcactg

SEQ ID NO: 36877 - DNA, 20 bp, Acinetobacter lwoffii
ggctaccgagattaatactc

SEQ ID NO: 36878 - DNA, 20 bp, Cardiobacterium hominis
gatgtcaactaggcgtcggg

SEQ ID NO: 36879 - DNA, 20 bp, Streptococcus parauberis
ccgtggctcaaccatggttc

SEQ ID NO: 36880 - DNA, 20 bp, Neisseria sicca
cttcgggccttgcgctgttt

SEQ ID NO: 36881 - DNA, 20 bp, Weissella paramesenteroides
aatggcatatacaacgagtc

SEQ ID NO: 36882 - DNA, 20 bp, Streptococcus infantis
aggaggagcttgctcttctg

SEQ ID NO: 36883 - DNA, 20 bp, Leptotrichia buccalis
ggtggacggaactgcacgag

SEQ ID NO: 36884 - DNA, 20 bp, Campylobacter curvus
ccaaataccaaaccggttat

SEQ ID NO: 36885 - DNA, 20 bp, Tissierella praeacuta
gttctgtcctaagggacgat

SEQ ID NO: 36886 - DNA, 20 bp, Corynebacterium amycolatum
gtcgaacggtaaggctccag

SEQ ID NO: 36887 - DNA, 20 bp, Brevundimonas diminuta
agggcgcgtaggcggatcgt

SEQ ID NO: 36888 - DNA, 20 bp, Moraxella osloensis
cgcaagctcttgctattaga

SEQ ID NO: 36889 - DNA, 20 bp, Burkholderia multivorans
agaaatccctggctctaata

SEQ ID NO: 36890 - DNA, 20 bp, Paenibacillus pabuli
caacgggctgtgaagccgcg

SEQ ID NO: 36891 - DNA, 20 bp, Enterococcus raffinosus
ggtttctatttgaaaggcgc

SEQ ID NO: 36892 - DNA, 20 bp, Pseudoramibacter alactolyticus
ggtgaaattagaactggaaa

SEQ ID NO: 36893 - DNA, 20 bp, Corynebacterium propinquum
atgcgcagcgagcctgtgag

SEQ ID NO: 36894 - DNA, 20 bp, Paenibacillus pabuli
tgccctcaagtttgggacaa

SEQ ID NO: 36895 - DNA, 20 bp, Helcococcus ovis
cttagtgaagataatgactg

SEQ ID NO: 36896 - DNA, 20 bp, Aerococcus christensenii
gctctgctatcacttatcga

SEQ ID NO: 36897 - DNA, 20 bp, Bacteroides ureolyticus
tagtcaaggcagtaatgcag

SEQ ID NO: 36898 - DNA, 20 bp, Lactococcus lactis
actcaaagatgatcccgcgt

SEQ ID NO: 36899 - DNA, 20 bp, Porphyromonas endodontalis
tcacacagaacgccgattgc

SEQ ID NO: 36900 - DNA, 20 bp, Streptococcus agalactiae
gaacgctgaggtttggtgtt

SEQ ID NO: 36901 - DNA, 20 bp, Streptococcus pyogenes
tgagaactggtgcttgcacc

SEQ ID NO: 36902 - DNA, 20 bp, Gemella bergeri
taagtgttggtctcaaaaga

SEQ ID NO: 36903 - DNA, 20 bp, Vibrio cholerae
tcccctgctttgctcttgcg

SEQ ID NO: 36904 - DNA, 20 bp, Aerococcus viridans
cttcttccgcatggaagaag

SEQ ID NO: 36905 - DNA, 20 bp, Moraxella lacunata
ccttagttaccagcgattta

SEQ ID NO: 36906 - DNA, 20 bp, Pseudoramibacter alactolyticus
ttattggggaagaaaacatg

SEQ ID NO: 36907 - DNA, 20 bp, Geobacillus thermoglucosidasius
gcgggaggacagggtgacag

SEQ ID NO: 36908 - DNA, 20 bp, Cardiobacterium hominis
gggaacctagagacaggtgt

SEQ ID NO: 36909 - DNA, 20 bp, Budvicia aquatica
gagctcgcgagagtaagcgg

SEQ ID NO: 36910 - DNA, 20 bp, Moraxella osloensis
aatattgacactgagattcg

SEQ ID NO: 36911 - DNA, 20 bp, Streptococcus parasanguinis
gtcgacattgcatgatgttg

SEQ ID NO: 36912 - DNA, 20 bp, Corynebacterium glucuronolyticum
agagggtgtgcggccacatt

SEQ ID NO: 36913 - DNA, 20 bp, Streptococcus agalactiae
tttggtgtttacactagact

SEQ ID NO: 36914 - DNA, 20 bp, Bacteroides vulgatus
ttgtcagttactaacaggtt

SEQ ID NO: 36915 - DNA, 20 bp, Atopobium parvulum
aatgatgggtagctgggttg

SEQ ID NO: 36916 - DNA, 20 bp, Lactococcus raffinolactis
aagttccttcgggacacggg

SEQ ID NO: 36917 - DNA, 20 bp, Bacillus pallidus
aaaccgcatggttttcggtt

SEQ ID NO: 36918 - DNA, 20 bp, Bacillus simplex
ctcgcatgagagaagatgga

SEQ ID NO: 36919 - DNA, 20 bp, Peptoniphilus indolicus
cctttgacacggggatagcc

SEQ ID NO: 36920 - DNA, 20 bp, Campylobacter sputorum
tccttttctttgggaagaat

SEQ ID NO: 36921 - DNA, 20 bp, Bacillus oleronius
cgagcgaatctgatgggagc

SEQ ID NO: 36922 - DNA, 20 bp, Bacillus sp
ttgcttttgatcagttagcg

SEQ ID NO: 36923 - DNA, 20 bp, Finegoldia magna
ctatgacagtgggatagcct

SEQ ID NO: 36924 - DNA, 20 bp, Leuconostoc argentinum
tagtatcgcatgatacaaag

SEQ ID NO: 36925 - DNA, 20 bp, Atopobium parvulum
gcaatgatgggtagctgggt

SEQ ID NO: 36926 - DNA, 20 bp, Facklamia hominis
ctgttagcggagtgacggta

SEQ ID NO: 36927 - DNA, 20 bp, Brevibacterium epidermidis
agaggcgaacccgtgagggt

SEQ ID NO: 36928 - DNA, 20 bp, Anaerococcus tetradius
aagatggacttgcgtctgat

SEQ ID NO: 36929 - DNA, 20 bp, Fusobacterium mortiferum
tacctgaagacggtcaccgc

SEQ ID NO: 36930 - DNA, 20 bp, Clostridium ramosum
cgacgatctggcctgcaact

SEQ ID NO: 36931 - DNA, 20 bp, Haemophilus paraphrophilus
gtgttaatagcgcaacaaat

SEQ ID NO: 36932 - DNA, 20 bp, Streptococcus agalactiae
gtagaacgctgaggtttggt

SEQ ID NO: 36933 - DNA, 20 bp, Lactococcus lactis
ggtgagagtggaaagctcat

SEQ ID NO: 36934 - DNA, 20 bp, Brochothrix campestris
cgagaaatcgatgctaatac

SEQ ID NO: 36935 - DNA, 20 bp, Corynebacterium jeikeium
ttttatttacgattcccgtg

SEQ ID NO: 36936 - DNA, 20 bp, Granulicatella elegans
tgactgaagaaggaaaagag

SEQ ID NO: 36937 - DNA, 20 bp, Veillonella atypica
agtcgaacgaagagcgatgg

SEQ ID NO: 36938 - DNA, 20 bp, Streptococcus bovis
cttgctagagtagaaggagt

SEQ ID NO: 36939 - DNA, 20 bp, Bacillus sp
tgacgcatgtggaacgagcg

SEQ ID NO: 36940 - DNA, 20 bp, Actinomyces bovis
tggaacttagtggcgaacgg

SEQ ID NO: 36941 - DNA, 20 bp, Pseudoramibacter alactolyticus
aacatgacggtacccaatga

SEQ ID NO: 36942 - DNA, 20 bp, Clostridium tetani
ttgagatgggcccgcgcccc

SEQ ID NO: 36943 - DNA, 20 bp, Neisseria meningitidis
ccctgctttctctctcaaga

SEQ ID NO: 36944 - DNA, 20 bp, Bacillus megaterium
gatcttctccttcatgggag

SEQ ID NO: 36945 - DNA, 20 bp, Campylobacter lari
tttaatacttagtggcgcac

SEQ ID NO: 36946 - DNA, 20 bp, Aerococcus viridans
ataatatcttcttccgcatg

SEQ ID NO: 36947 - DNA, 20 bp, Prevotella denticola
gccactcgagtaccagtgca

SEQ ID NO: 36948 - DNA, 20 bp, Bacillus fusiformis
tgtttcacctcatggtgaaa

SEQ ID NO: 36949 - DNA, 20 bp, Prevotella oralis
aaaacgtgcctcagttcgga

SEQ ID NO: 36950 - DNA, 20 bp, Pseudoramibacter alactolyticus
aattagaactggaaagtggc

SEQ ID NO: 36951 - DNA, 20 bp, Streptococcus hyovaginalis
ggatttcccttcggggcact

SEQ ID NO: 36952 - DNA, 20 bp, Clostridium ramosum
cttctgttataaaggaagaa

SEQ ID NO: 36953 - DNA, 20 bp, Actinomyces naeslundii
aaccgcatgaaagtgtggct

SEQ ID NO: 36954 - DNA, 20 bp, Cardiobacterium hominis
gtgggaactgtaaggagact

SEQ ID NO: 36955 - DNA, 20 bp, Eggerthella lenta
gacggcaagggatggggtcg

SEQ ID NO: 36956 - DNA, 20 bp, Peptostreptococcus anaerobius
cgtcgaaggtggcgtcgata

SEQ ID NO: 36957 - DNA, 20 bp, Pasteurella multocida
tagatagcatcattgacgtt

SEQ ID NO: 36958 - DNA, 20 bp, Unknown Organism
  oligonucleotide from CDC group EF-4B
gggataactgtccgaaagga

SEQ ID NO: 36959 - DNA, 20 bp, Gemella haemolysans
agatcagtgctgcagctaac

SEQ ID NO: 36960 - DNA, 20 bp, Gemella haemolysans
tgacctttggttagacacag

SEQ ID NO: 36961 - DNA, 20 bp, Edwardsiella hoshinae
acaattgacgttacctacag

SEQ ID NO: 36962 - DNA, 20 bp, Fusobacterium mortiferum
agagtcgcaaacctgcgagg

SEQ ID NO: 36963 - DNA, 20 bp, Corynebacterium glucuronolyticum
gcttgacatatgtgagattg

SEQ ID NO: 36964 - DNA, 20 bp, Neisseria sicca
gataccagaagcaggtaggc

SEQ ID NO: 36965 - DNA, 20 bp, Pseudoramibacter alactolyticus
tgagagaaccgcaaggactc

SEQ ID NO: 36966 - DNA, 20 bp, Anaerococcus prevotii
catactgaggaccggtatag

SEQ ID NO: 36967 - DNA, 20 bp, Ignavigranum ruoffiae
cattgagatggggactctaa

SEQ ID NO: 36968 - DNA, 20 bp, Moraxella lacunata
cgcatacgtcttacgagaga

SEQ ID NO: 36969 - DNA, 20 bp, Corynebacterium propinquum
ggggtttctgtgccgtagct

SEQ ID NO: 36970 - DNA, 20 bp, Geobacillus stearothermophilus
caagtcgagcggaccggatt

SEQ ID NO: 36971 - DNA, 20 bp, Clostridium clostridiiforme
agtgaaaacccagggctcaa

SEQ ID NO: 36972 - DNA, 20 bp, Paenibacillus peoriae
tagaagcttgcttctaaaca

SEQ ID NO: 36973 - DNA, 20 bp, Nocardia asteroides
ctacctcgcgagaggatgct

SEQ ID NO: 36974 - DNA, 20 bp, Alcaligenes faecalis
gtacctcctaatacgaggta

SEQ ID NO: 36975 - DNA, 20 bp, Fusobacterium varium
gaagttaacagagatgtttt

SEQ ID NO: 36976 - DNA, 20 bp, Streptococcus thoraltensis
acgagttgcgagctggtgac

SEQ ID NO: 36977 - DNA, 20 bp, Veillonella dispar
tagttagaaggattgacggt

SEQ ID NO: 36978 - DNA, 20 bp, Bacteroides eggerthii
ccaccaagtcaacgatggat

SEQ ID NO: 36979 - DNA, 20 bp, Bacteroides uniformis
gatgctaatccctaaagcct

SEQ ID NO: 36980 - DNA, 20 bp, Bacillus coagulans
gcggcgccttgacggtaccc

SEQ ID NO: 36981 - DNA, 20 bp, Streptococcus sp.
attaattgaaagatgcaatt

SEQ ID NO: 36982 - DNA, 20 bp, Tissierella praeacuta
cggctcaaccgtggtaagca

SEQ ID NO: 36983 - DNA, 20 bp, Lactococcus lactis
taccgcataacaactttaaa

SEQ ID NO: 36984 - DNA, 20 bp, Veillonella atypica
gaaacactctctcagttcgg

SEQ ID NO: 36985 - DNA, 20 bp, Anaerobiospirillum succiniciproducens
cgtaggaatcttttagagat

SEQ ID NO: 36986 - DNA, 20 bp, Vagococcus fluvialis
attttcaccggagcttgctc

SEQ ID NO: 36987 - DNA, 20 bp, Actinomyces odontolyticus
gcactgcagagatgtggtgg

SEQ ID NO: 36988 - DNA, 20 bp, Neisseria subflava
aaaggatagggttaataccc

SEQ ID NO: 36989 - DNA, 20 bp, Streptococcus parauberis
gctcaaccatggttcgcttt

SEQ ID NO: 36990 - DNA, 20 bp, Arcanobacterium bernardiae
ttctgctttcatcgcatggt

SEQ ID NO: 36991 - DNA, 20 bp, Bacillus coagulans
cgtgagtgaagaaggccttc

SEQ ID NO: 36992 - DNA, 20 bp, Helcococcus kunzii
agcaagcgaatcgcataaaa

SEQ ID NO: 36993 - DNA, 20 bp, Oligella urethralis
tgagaaaagtggtttacaac

SEQ ID NO: 36994 - DNA, 20 bp, Proteus mirabilis
cttgcactatcggatgaacc

SEQ ID NO: 36995 - DNA, 20 bp, Prevotella loescheii
tagccagacggcggggtaac

SEQ ID NO: 36996 - DNA, 20 bp, Propionibacterium freudenreichii
agcttgtaggcggttgatca

SEQ ID NO: 36997 - DNA, 20 bp, Haemophilus actinemycetemcomitans
gggatgtactgacgctgatg

SEQ ID NO: 36998 - DNA, 20 bp, Alicyclobacillus acidocaldarius
ctctctcagcggcccaattg

SEQ ID NO: 36999 - DNA, 20 bp, Bacillus oleronius
gacatcctcttgacctccct

SEQ ID NO: 37000 - DNA, 20 bp, Pediococcus inopinatus
tttaactataaagtgagtgg

SEQ ID NO: 37001 - DNA, 20 bp, Actinomyces naeslundii
ctccggagacggggtttcct

SEQ ID NO: 37002 - DNA, 20 bp, Pasteurella trehalosi
tgaggaaggtgttttgttta

SEQ ID NO: 37003 - DNA, 20 bp, Leuconostoc argentinum
ggaatgattctagttcgacg

SEQ ID NO: 37004 - DNA, 20 bp, Bacteroides ureolyticus
ctttgctagtcaaggcagta

SEQ ID NO: 37005 - DNA, 20 bp, Campylobacter sputorum
cccttctagagatagaagtt

SEQ ID NO: 37006 - DNA, 20 bp, Geobacillus thermoglucosidasius
ctaagtgttagaggggttat

SEQ ID NO: 37007 - DNA, 20 bp, Helcococcus kunzii
tgttaaagaatttcggtgaa

SEQ ID NO: 37008 - DNA, 20 bp, Streptococcus agalactiae
ttagttatttaaaaggagca

SEQ ID NO: 37009 - DNA, 20 bp, Vibrio hollisae
ggtgagtaaaggctgggaac

SEQ ID NO: 37010 - DNA, 20 bp, Propionibacterium freudenreichii
agctccaggaaactggtggt

SEQ ID NO: 37011 - DNA, 20 bp, Clostridium paraputrificum
aagattgtagcttcgcatga

SEQ ID NO: 37012 - DNA, 20 bp, Streptococcus thermophilus
ttgctccactacaagatgga

SEQ ID NO: 37013 - DNA, 20 bp, Streptococcus canis
tgcactagtctaaggagttg

SEQ ID NO: 37014 - DNA, 20 bp, Facklamia languida
gaaggaaagacggcttcggc

SEQ ID NO: 37015 - DNA, 20 bp, Moraxella osloensis
tgtgatactggtggtgctag

SEQ ID NO: 37016 - DNA, 20 bp, Tetragenococcus halophilus
cctatccatcagcgggggat

SEQ ID NO: 37017 - DNA, 20 bp, Corynebacterium group F
gtgtaagtccacagcttaac

SEQ ID NO: 37018 - DNA, 20 bp, Corynebacterium seminale
tccagcttgctggggtgctc

SEQ ID NO: 37019 - DNA, 20 bp, Corynebacterium coyleae
acatacaccagatcgccgta

SEQ ID NO: 37020 - DNA, 20 bp, Peptoniphilus indolicus
acacggggatagccaccgga

SEQ ID NO: 37021 - DNA, 20 bp, Clostridium paraputrificum
gcatgaagtagcaattaaag

SEQ ID NO: 37022 - DNA, 20 bp, Brevundimonas vesicularis
aaggcgacacactggctcat

SEQ ID NO: 37023 - DNA, 20 bp, Bacillus lentus
tccgccgctaaccaacaaaa

SEQ ID NO: 37024 - DNA, 20 bp, Brevibacillus laterosporus
cgagaagatgctaatctctt

SEQ ID NO: 37025 - DNA, 20 bp, Bacteroides fragilis
agtatgtatactgttttgta

SEQ ID NO: 37026 - DNA, 20 bp, Paenibacillus larvae
gtaagaccgggataacttgc

SEQ ID NO: 37027 - DNA, 20 bp, Bacteroides fragilis
ggggcatcaggaagaaagct

SEQ ID NO: 37028 - DNA, 20 bp, Anaerococcus tetradius
ggcggataagcaagttagaa

SEQ ID NO: 37029 - DNA, 20 bp, Enterobacter cloacae
gcggggaggaaggcgacagg

SEQ ID NO: 37030 - DNA, 20 bp, Arcanobacterium bernardiae
ctcctttcagtacagaacaa

SEQ ID NO: 37031 - DNA, 20 bp, Bacillus alcalophilus
ccaaagggagcttgctccca

SEQ ID NO: 37032 - DNA, 20 bp, Leuconostoc pseudomesenteroides
gttaaaaggcgctttggcgt

SEQ ID NO: 37033 - DNA, 20 bp, Bacillus pallidus
tttagctgtcactgcaggat

SEQ ID NO: 37034 - DNA, 20 bp, Macrococcus caseolyticus
gtcgagcgaacggacgagag

SEQ ID NO: 37035 - DNA, 20 bp, Streptococcus constellatus
gtataagaacatttactgca

SEQ ID NO: 37036 - DNA, 20 bp, Prevotella oralis
taatggatggggatgcgtcc

SEQ ID NO: 37037 - DNA, 20 bp, Actinomyces bovis
aaaagcacagagatgtgtaa

SEQ ID NO: 37038 - DNA, 20 bp, Staphylococcus aureus
aagcaagcttctcgtccgtt

SEQ ID NO: 37039 - DNA, 20 bp, Veillonella dispar
gcatcgaggatagatgaaag

SEQ ID NO: 37040 - DNA, 20 bp, Myroides odoratus
ctgttcggttttcggactga

SEQ ID NO: 37041 - DNA, 20 bp, Corynebacterium group F
ttgcactggtactcgagtgg

SEQ ID NO: 37042 - DNA, 20 bp, Fusobacterium varium
taccggatattatgactgag

SEQ ID NO: 37043 - DNA, 20 bp, Prevotella intermedia
ttctggacgtcgaccggcgc

SEQ ID NO: 37044 - DNA, 20 bp, Prevotella melaninogenica
ataatgacgcccttcggggt

SEQ ID NO: 37045 - DNA, 20 bp, Pasteurella multocida
gatgttgttaaatagatagc

SEQ ID NO: 37046 - DNA, 20 bp, Bacteroides ovatus
cagaaggcggctacctggcg

SEQ ID NO: 37047 - DNA, 20 bp, Corynebacterium auris
ttgtgtaagtccatggctta

SEQ ID NO: 37048 - DNA, 20 bp, Corynebacterium amycolatum
ggataggaccatggtgtgga

SEQ ID NO: 37049 - DNA, 20 bp, Prevotella loescheii
ccaccgtggctacgatcggt

SEQ ID NO: 37050 - DNA, 20 bp, Corynebacterium glucuronolyticum
ctgggcttgacatatgtgag

SEQ ID NO: 37051 - DNA, 20 bp, Aeromonas hydrophila
gatgcctaatacgtatcaac

SEQ ID NO: 37052 - DNA, 20 bp, Aeromonas sobria
taaaactgttcagctagagt

SEQ ID NO: 37053 - DNA, 20 bp, Pseudoramibacter alactolyticus
aggaagtttccttcgggaac

SEQ ID NO: 37054 - DNA, 20 bp, Alicyclobacillus acidocaldarius
tcccccgcaagaagatgcct

SEQ ID NO: 37055 - DNA, 20 bp, Propionibacterium propionicus
ggaaagttctggcggtgggg

SEQ ID NO: 37056 - DNA, 20 bp, Bacteroides uniformis
tacacggcgacgtgatgcta

SEQ ID NO: 37057 - DNA, 20 bp, Streptococcus equi
tctgtgagtcgcgaacgggt

SEQ ID NO: 37058 - DNA, 20 bp, Corynebacterium urealyticum
accaatctttagtgtggttg

SEQ ID NO: 37059 - DNA, 20 bp, Streptococcus anginosus
aatggaaagttcatactgtg

SEQ ID NO: 37060 - DNA, 20 bp, Actinomyces naeslundii
cttttccgggtcttccgcgc

SEQ ID NO: 37061 - DNA, 20 bp, Dermabacter hominis
atggcccaagctttatgcgg

SEQ ID NO: 37062 - DNA, 20 bp, Rhizobium radiobacter
ttgggcagtggagacattgt

SEQ ID NO: 37063 - DNA, 20 bp, Anaerococcus prevotii
agataagatggattagcggc

SEQ ID NO: 37064 - DNA, 20 bp, Bacillus fusiformis
ctaatccgataaagtcgttc

SEQ ID NO: 37065 - DNA, 20 bp, Brevibacterium epidermidis
tctctttggagctggtgtac

SEQ ID NO: 37066 - DNA, 20 bp, Serratia marcescens
tggtgagcttaatacgttca

SEQ ID NO: 37067 - DNA, 20 bp, Anaerococcus tetradius
aaataatatagctcaactat

SEQ ID NO: 37068 - DNA, 20 bp, Pediococcus inopinatus
tggagtaaccttcgggagct

SEQ ID NO: 37069 - DNA, 20 bp, Pediococcus dextrinicus
tggctagtacaacgagttgc

SEQ ID NO: 37070 - DNA, 20 bp, Helcococcus kunzii
tagatgaggggaaagtggaa

SEQ ID NO: 37071 - DNA, 20 bp, Photobacterium damselae
gttaacacctgcattatttg

SEQ ID NO: 37072 - DNA, 20 bp, Lactococcus lactis
ctcatcaagtgacggtaact

SEQ ID NO: 37073 - DNA, 20 bp, Neisseria lactamica
agcctgactgcttggtagcg

SEQ ID NO: 37074 - DNA, 20 bp, Campylobacter lari
accttatagagatatgaggg

SEQ ID NO: 37075 - DNA, 20 bp, Anaerococcus prevotii
cagaacccttcggggtgaag

SEQ ID NO: 37076 - DNA, 20 bp, Bacteroides forsythus
cagctaccgggcgaccggat

SEQ ID NO: 37077 - DNA, 20 bp, Leptotrichia buccalis
gagaacaggcagtgccttcg

SEQ ID NO: 37078 - DNA, 20 bp, Sphingobacterium multivorum
tagagatgggctcgcgtgac

SEQ ID NO: 37079 - DNA, 20 bp, Weissella paramesenteroides
gtcgaacgctttgtctttaa

SEQ ID NO: 37080 - DNA, 20 bp, Myroides odoratus
gaagtcggtcgccgcaagga

SEQ ID NO: 37081 - DNA, 20 bp, Veillonella parvula
ccgcatacgatctaacctcg

SEQ ID NO: 37082 - DNA, 20 bp, Corynebacterium coyleae
gagggtgagctaatcgctgt

SEQ ID NO: 37083 - DNA, 20 bp, Abiotrophia defectiva
gggtaacctacctcatagtg

SEQ ID NO: 37084 - DNA, 20 bp, Brevibacterium casei
agagagaggcgaacccgtga

SEQ ID NO: 37085 - DNA, 20 bp, Propionibacterium granulosum
cagcagggacgaagcttttt

SEQ ID NO: 37086 - DNA, 20 bp, Streptococcus equi
gatgctattcttagagataa

SEQ ID NO: 37087 - DNA, 20 bp, Anaerococcus tetradius
accgagcgttgtccggaatc

SEQ ID NO: 37088 - DNA, 20 bp, Facklamia sourekii
tgaaatcctacgggacaagg

SEQ ID NO: 37089 - DNA, 20 bp, Brevibacillus agri
tgaaaagaaaagatggcttt

SEQ ID NO: 37090 - DNA, 20 bp, Aerococcus christensenii
cgtaaagggggcgcaggctg

SEQ ID NO: 37091 - DNA, 20 bp, Acinetobacter genospecies 3
agtagctagcctaactgcaa

SEQ ID NO: 37092 - DNA, 20 bp, Bacteroides merdae
cataactgacactgaagcac

SEQ ID NO: 37093 - DNA, 20 bp, Actinomyces bovis
accgcgcaaaagcacagaga

SEQ ID NO: 37094 - DNA, 20 bp, Methylobacterium extorquens
tgttacctcgagagatcggg

SEQ ID NO: 37095 - DNA, 20 bp, Prevotella denticola
tgcatccaatcttgaaagcc

SEQ ID NO: 37096 - DNA, 20 bp, Enterococcus casseliflavus
aataccgtataacactattt

SEQ ID NO: 37097 - DNA, 20 bp, Peptostreptococcus anaerobius
agttctgttgcaggggaaga

SEQ ID NO: 37098 - DNA, 20 bp, Streptococcus dysgalactiae
ttgttagagaagaatgatgg

SEQ ID NO: 37099 - DNA, 20 bp, Bacteroides distasonis
caaaccacgtctcagttcgg

SEQ ID NO: 37100 - DNA, 20 bp, Gemella haemolysans
agcgaagtttttctggtgct

SEQ ID NO: 37101 - DNA, 20 bp, Campylobacter concisus
atacggtttccctttgtggt

SEQ ID NO: 37102 - DNA, 20 bp, Oligella urethralis
cttcgtcccacacgcgagat

SEQ ID NO: 37103 - DNA, 20 bp, Cardiobacterium hominis
gcacgcaggcggttgcccaa

SEQ ID NO: 37104 - DNA, 20 bp, Facklamia ignava
ggctgtcactgaaggatggt

SEQ ID NO: 37105 - DNA, 20 bp, Geobacillus thermoglucosidasius
cgcttggttagcggcggacg

SEQ ID NO: 37106 - DNA, 20 bp, Bacteroides fragilis
gccctttactcggggatagc

SEQ ID NO: 37107 - DNA, 20 bp, Corynebacterium glucuronolyticum
tctgccctgcactgggggat

SEQ ID NO: 37108 - DNA, 20 bp, Bacteroides thetaiotaomicron
tccattagtttgttggcggg

SEQ ID NO: 37109 - DNA, 20 bp, Facklamia ignava
agtaactgttataggtttga

SEQ ID NO: 37110 - DNA, 20 bp, Fusobacterium mortiferum
gcgtctaggcggtttggtaa

SEQ ID NO: 37111 - DNA, 20 bp, Propionibacterium freudenreichii
agatgggcgtgcctttttgg

SEQ ID NO: 37112 - DNA, 20 bp, Propionibacterium freudenreichii
tttgacatgtactggaagcg

SEQ ID NO: 37113 - DNA, 20 bp, Streptococcus constellatus
taaaaggtgcaagagcatca

SEQ ID NO: 37114 - DNA, 20 bp, Paenibacillus validus
ggataggttagcggcggacg

SEQ ID NO: 37115 - DNA, 20 bp, Bacillus badius
agaacaagtacggaagtaac

SEQ ID NO: 37116 - DNA, 20 bp, Brevibacillus parabrevis
cagggacgaacacgtgccgt

SEQ ID NO: 37117 - DNA, 20 bp, Bacillus lentus
cgtcaaggtaccggcatttc

SEQ ID NO: 37118 - DNA, 20 bp, Clostridium glycolicum
aacctgcctcatacacatgg

SEQ ID NO: 37119 - DNA, 20 bp, Bacteroides capilosus
tatcgctctgagatggcctc

SEQ ID NO: 37120 - DNA, 20 bp, Bacteroides uniformis
tgaattgcaactgaatgatg

SEQ ID NO: 37121 - DNA, 20 bp, Haemophilus haemolyticus
cagagggtggcgaaactgcg

SEQ ID NO: 37122 - DNA, 20 bp, Actinomyces turicensis
caagccgcagctttgggttg

SEQ ID NO: 37123 - DNA, 20 bp, Bacteroides fragilis
gggcatcaggaagaaagctt

SEQ ID NO: 37124 - DNA, 20 bp, Leptotrichia buccalis
gaacaggcagtgccttcggg

SEQ ID NO: 37125 - DNA, 20 bp, Acinetobacter lwoffii
gagattaatactcttggata

SEQ ID NO: 37126 - DNA, 20 bp, Prevotella intermedia
gtctgttaagcgtgttgtga

SEQ ID NO: 37127 - DNA, 20 bp, Ralstonia paucula
aaattgctctggctaatacc

SEQ ID NO: 37128 - DNA, 20 bp, Cardiobacterium hominis
caactaggcgtcgggttgtt

SEQ ID NO: 37129 - DNA, 20 bp, Peptostreptococcus anaerobius
atggataacatactgaaaag

SEQ ID NO: 37130 - DNA, 20 bp, Campylobacter lari
taaccgttgaactgcttggg

SEQ ID NO: 37131 - DNA, 20 bp, Gemella bergeri
aagggaggagccggtcacgg

SEQ ID NO: 37132 - DNA, 20 bp, Streptococcus sp.
taaaattgattattgcatga

SEQ ID NO: 37133 - DNA, 20 bp, Anaerococcus tetradius
cggcctagtaagttagaagt

SEQ ID NO: 37134 - DNA, 20 bp, Bacteroides vulgatus
gatgccaatccccaaaacct

SEQ ID NO: 37135 - DNA, 20 bp, Corynebacterium propinquum
ggctcaaactcgtttaggga

SEQ ID NO: 37136 - DNA, 20 bp, Tissierella praeacuta
ctttaccttcgggtacaggg

SEQ ID NO: 37137 - DNA, 20 bp, Prevotella disiens
agtgtaggcggttggttaag

SEQ ID NO: 37138 - DNA, 20 bp, Tetragenococcus halophilus
aatgctttttccatgacggt

SEQ ID NO: 37139 - DNA, 20 bp, Eggerthella lenta
ctctcaagcgggatctctaa

SEQ ID NO: 37140 - DNA, 20 bp, Brevibacillus choshinensis
cctagagataggagctctct

SEQ ID NO: 37141 - DNA, 20 bp, Bacteroides fragilis
tgtatactgttttgtatgta

SEQ ID NO: 37142 - DNA, 20 bp, Streptococcus porcinus
gaagacccatgtcatctact

SEQ ID NO: 37143 - DNA, 20 bp, Prevotella melaninogenica
tccatcaggttaagctgggc

SEQ ID NO: 37144 - DNA, 20 bp, Campylobacter curvus
gtatactagttgttgctaag

SEQ ID NO: 37145 - DNA, 20 bp, Acinetobacter johnsonii
acttggattaatactctagg

SEQ ID NO: 37146 - DNA, 20 bp, Acinetobacter johnsonii
ttgctacctaacctagcggc

SEQ ID NO: 37147 - DNA, 20 bp, Actinomyces neuii
gagactgcagagatgtggtt

SEQ ID NO: 37148 - DNA, 20 bp, Bacillus lentus
gataatctatccggtattag

SEQ ID NO: 37149 - DNA, 20 bp, Leptotrichia buccalis
cagggataacagacggaaac

SEQ ID NO: 37150 - DNA, 20 bp, Bacteroides fragilis
gcgtaggtggactggtaagt

SEQ ID NO: 37151 - DNA, 20 bp, Gemella haemolysans
gagcgaagtttttctggtgc

SEQ ID NO: 37152 - DNA, 20 bp, Moraxella atlantae
ttgctataagatgtgcctaa

SEQ ID NO: 37153 - DNA, 20 bp, Corynebacterium afermentans
agagaccttgcggggcgact

SEQ ID NO: 37154 - DNA, 20 bp, Haemophilus haemolyticus
acagagggtggcgaaactgc

SEQ ID NO: 37155 - DNA, 20 bp, Gemella bergeri
agaacctgccttatagactg

SEQ ID NO: 37156 - DNA, 20 bp, Alicyclobacillus acidocaldarius
ggcgtatccggcattagcgc

SEQ ID NO: 37157 - DNA, 20 bp, Gemella haemolysans
tcatagactgggacaactat

SEQ ID NO: 37158 - DNA, 20 bp, Streptococcus salivarius
tgttgtaagtcaagaacgag

SEQ ID NO: 37159 - DNA, 20 bp, Clostridium limosum
tgcccttcggggaacttggt

SEQ ID NO: 37160 - DNA, 20 bp, Bacteroides uniformis
gatggcatagttcttccgca

SEQ ID NO: 37161 - DNA, 20 bp, Porphyromonas endodontalis
ctgcagctcaactgtagtct

SEQ ID NO: 37162 - DNA, 20 bp, Streptococcus bovis
agtagaacgctgactacttt

SEQ ID NO: 37163 - DNA, 20 bp, Propionibacterium freudenreichii
ttctctggacatttcctgac

SEQ ID NO: 37164 - DNA, 20 bp, Corynebacterium glucuronolyticum
ggcgatacgggcattgcttg

SEQ ID NO: 37165 - DNA, 20 bp, Corynebacterium jeikeium
atttacgattcccgtgccgt

SEQ ID NO: 37166 - DNA, 20 bp, Corynebacterium glucuronolyticum
acgaagtttttttgacggta

SEQ ID NO: 37167 - DNA, 20 bp, Streptococcus hyovaginalis
atcccagtgaccatcctaga

SEQ ID NO: 37168 - DNA, 20 bp, Alicyclobacillus acidocaldarius
tttccgggcgttattccggc

SEQ ID NO: 37169 - DNA, 20 bp, Neisseria subflava
gtcagggaagaaaaggatag

SEQ ID NO: 37170 - DNA, 20 bp, Bacteroides forsythus
cgtaagctgtgaggaaggtt

SEQ ID NO: 37171 - DNA, 20 bp, Gemella bergeri
tagacaacacagatacaggt

SEQ ID NO: 37172 - DNA, 20 bp, Fusobacterium nucleatum
agagtcgcaaagctgtgaag

SEQ ID NO: 37173 - DNA, 20 bp, Aerococcus christensenii
tgctaataccgcataggaag

SEQ ID NO: 37174 - DNA, 20 bp, Tissierella praeacuta
gtggtaagcatttgaaactg

SEQ ID NO: 37175 - DNA, 20 bp, Enterobacter gergoviae
ggaggaagggagtgaggtta

SEQ ID NO: 37176 - DNA, 20 bp, Campylobacter rectus
taagttaagtcgggaaagtt

SEQ ID NO: 37177 - DNA, 20 bp, Fusobacterium nucleatum
tcccttcggggaaacctaaa

SEQ ID NO: 37178 - DNA, 20 bp, Aneurinibacillus aneurinilyticus
accgcatggtctgaaagaga

SEQ ID NO: 37179 - DNA, 20 bp, Prevotella bivia
gcaggtaccatatgaataag

SEQ ID NO: 37180 - DNA, 20 bp, Streptococcus infantarius
ttcaaactttagcaagctaa

SEQ ID NO: 37181 - DNA, 20 bp, Enterococcus raffinosus
ccttgctatcacttatagat

SEQ ID NO: 37182 - DNA, 20 bp, Anaerococcus tetradius
catcttgaggtatggaaggg

SEQ ID NO: 37183 - DNA, 20 bp, Helcococcus kunzii
ttcggagacttgtatacagg

SEQ ID NO: 37184 - DNA, 20 bp, Streptococcus porcinus
atgaaagtagaagacccatg

SEQ ID NO: 37185 - DNA, 20 bp, Wolinella succinogenes
ttcaaccaaaggagcaatcc

SEQ ID NO: 37186 - DNA, 20 bp, Streptococcus infantarius
tgctgcctcccgtaggagct

SEQ ID NO: 37187 - DNA, 20 bp, Clostridium histolyticum
gagagaagcaagaccgtgag

SEQ ID NO: 37188 - DNA, 20 bp, Moraxella lacunata
cgatttaagtcgggaactct

SEQ ID NO: 37189 - DNA, 20 bp, Bacillus pumilus
agtcgagcgaacagaaggga

SEQ ID NO: 37190 - DNA, 20 bp, Moraxella osloensis
agcttcctggcataatattg

SEQ ID NO: 37191 - DNA, 20 bp, Bacteroides uniformis
cagctacacggcgacgtgat

SEQ ID NO: 37192 - DNA, 20 bp, Bacteroides uniformis
agccgcaaggcagttgtgaa

SEQ ID NO: 37193 - DNA, 20 bp, Fusobacterium nucleatum
taattatgaaagctataagc

SEQ ID NO: 37194 - DNA, 20 bp, Neisseria lactamica
gacttttgtcggggaagaaa

SEQ ID NO: 37195 - DNA, 20 bp, Neisseria subflava
gctaacatcagcggctgatg

SEQ ID NO: 37196 - DNA, 20 bp, Streptococcus thermophilus
tgtcatttatttgaaagggg

SEQ ID NO: 37197 - DNA, 20 bp, Weeksella virosa
ttaaagacggggactctaat

SEQ ID NO: 37198 - DNA, 20 bp, Acinetobacter haemolyticus
tgctacattacctagcggcg

SEQ ID NO: 37199 - DNA, 20 bp, Bacteroides forsythus
tttgcgatatagtgtaagct

SEQ ID NO: 37200 - DNA, 20 bp, Corynebacterium accolens
tgcttctctggatgagttgc

SEQ ID NO: 37201 - DNA, 20 bp, Bacillus simplex
taccggatacgttcttttct

SEQ ID NO: 37202 - DNA, 20 bp, Prevotella melaninogenica
gggaaacggcattgagtgct

SEQ ID NO: 37203 - DNA, 20 bp, Clostridium histolyticum
acagagagaagcaagaccgt

SEQ ID NO: 37204 - DNA, 20 bp, Oligella urethralis
ttgagaaaagtggtttacaa

SEQ ID NO: 37205 - DNA, 20 bp, Acinetobacter genospecies 3
ggagagaggtagcttgctac

SEQ ID NO: 37206 - DNA, 20 bp, Facklamia ignava
ctggaatgggaaagacggct

SEQ ID NO: 37207 - DNA, 20 bp, Clostridium clostridiiforme
ttaagcaagtctgaagtgaa

SEQ ID NO: 37208 - DNA, 20 bp, Bacteroides forsythus
aagtttgtcgcttaacgata

SEQ ID NO: 37209 - DNA, 20 bp, Propionibacterium acnes
aaccgctttcgcctgtgacg

SEQ ID NO: 37210 - DNA, 20 bp, Campylobacter sputorum
ataatatttcgaaccgcatg

SEQ ID NO: 37211 - DNA, 20 bp, Prevotella oralis
gttacaatggcgcgtacagc

SEQ ID NO: 37212 - DNA, 20 bp, Pseudoramibacter alactolyticus
gaaggtggggctagtaattg

SEQ ID NO: 37213 - DNA, 20 bp, Neisseria polysaccharea
ccgcatacgtcttgagaggg

SEQ ID NO: 37214 - DNA, 20 bp, Streptococcus sp.
taataccgcataaaattgat

SEQ ID NO: 37215 - DNA, 20 bp, Staphylococcus carnosus
caagtgcgtaggtaactatg

SEQ ID NO: 37216 - DNA, 20 bp, Bacteroides uniformis
cacccttatcgatagttacc

SEQ ID NO: 37217 - DNA, 20 bp, Streptococcus parasanguinis
agcggaggagttgcgaacgg

SEQ ID NO: 37218 - DNA, 20 bp, Corynebacterium argentoratense
cttgacatatacaggatcgc

SEQ ID NO: 37219 - DNA, 20 bp, Pediococcus inopinatus
aactataaagtgagtggcga

SEQ ID NO: 37220 - DNA, 20 bp, Cardiobacterium hominis
ctgcatttgaaactgggcga

SEQ ID NO: 37221 - DNA, 20 bp, Clostridium clostridiiforme
ttttgctagagtgtcggaga

SEQ ID NO: 37222 - DNA, 20 bp, Bacillus coagulans
gcatggaggaaaaaggaaag

SEQ ID NO: 37223 - DNA, 20 bp, Gemella haemolysans
catggttgatgtttaaaagt

SEQ ID NO: 37224 - DNA, 20 bp, Gemella haemolysans
tgtgaggacacaagagattg

SEQ ID NO: 37225 - DNA, 20 bp, Bordetella bronchiseptica
cacgggctaatatcctgtgc

SEQ ID NO: 37226 - DNA, 20 bp, Clostridium clostridiiforme
ttgctagagtgtcggagagg

SEQ ID NO: 37227 - DNA, 20 bp, Fusobacterium mortiferum
tcgggtgatggtggcggacg

SEQ ID NO: 37228 - DNA, 20 bp, Campylobacter concisus
caacgcgcatgcgagcctgt

SEQ ID NO: 37229 - DNA, 20 bp, Gemella morbillorum
gttagggaagaatggatatg

SEQ ID NO: 37230 - DNA, 20 bp, Corynebacterium ulcerans
gacatatacaagatcggcgt

SEQ ID NO: 37231 - DNA, 20 bp, Gemella haemolysans
tggaaaaacttagcggcgaa

SEQ ID NO: 37232 - DNA, 20 bp, Anaerococcus prevotii
aagataagatggattagcgg

SEQ ID NO: 37233 - DNA, 20 bp, Clostridium paraputrificum
acatctcctgaattaccatg

SEQ ID NO: 37234 - DNA, 20 bp, Ochrobactrum intermedium
cgagcgcgtagcaatacgag

SEQ ID NO: 37235 - DNA, 20 bp, Brevibacillus choshinensis
acctttggtcacgtacagat

SEQ ID NO: 37236 - DNA, 20 bp, Arcanobacterium haemolyticum
agatattctgcttctgccgc

SEQ ID NO: 37237 - DNA, 20 bp, Tissierella praeacuta
ggtacaacgagcagctactt

SEQ ID NO: 37238 - DNA, 20 bp, Facklamia ignava
cgccgagaagggaacttgtt

SEQ ID NO: 37239 - DNA, 20 bp, Streptococcus bovis
ttagcttgctagagtagaag

SEQ ID NO: 37240 - DNA, 20 bp, Bacillus sp
tctgtaagtgacagcttgcg

SEQ ID NO: 37241 - DNA, 20 bp, Corynebacterium xerosis
taccggataggaccgcaccg

SEQ ID NO: 37242 - DNA, 20 bp, Bacteroides thetaiotaomicron
gctcaccaaaccttcgatgg

SEQ ID NO: 37243 - DNA, 20 bp, Fusobacterium mortiferum
ctaagaaattagcagagatg

SEQ ID NO: 37244 - DNA, 20 bp, Neisseria polysaccharea
agagggaaagcaggggacct

SEQ ID NO: 37245 - DNA, 20 bp, Anaerobiospirillum succiniciproducens
tggagtggaacccacaaagc

SEQ ID NO: 37246 - DNA, 20 bp, Lactococcus lactis
acaagttttaagtttgaaag

SEQ ID NO: 37247 - DNA, 20 bp, Leptotrichia buccalis
ttaaagccggtccaagttcg

SEQ ID NO: 37248 - DNA, 20 bp, Corynebacterium glucuronolyticum
tgggggataagcttgggaaa

SEQ ID NO: 37249 - DNA, 20 bp, Anaerobiospirillum succiniciproducens
gtggagtggaacccacaaag

SEQ ID NO: 37250 - DNA, 20 bp, Anaerobiospirillum succiniciproducens
ggtggagtggaacccacaaa

SEQ ID NO: 37251 - DNA, 20 bp, Shewanella algae
gtaagttaataccttacatc

SEQ ID NO: 37252 - DNA, 20 bp, Peptoniphilus indolicus
tgacacatgtcataacgatc

SEQ ID NO: 37253 - DNA, 20 bp, Actinomyces bovis
ccaggtcttgacataccgcg

SEQ ID NO: 37254 - DNA, 20 bp, Haemophilus influenzae
tagcacatcaaattgacgtt

SEQ ID NO: 37255 - DNA, 20 bp, Bacteroides merdae
accttacccgggtttgaacg

SEQ ID NO: 37256 - DNA, 20 bp, Fusobacterium varium
ggagggatgttccgagggtg

SEQ ID NO: 37257 - DNA, 20 bp, Bacillus simplex
accagagtaactgctggtac

SEQ ID NO: 37258 - DNA, 20 bp, Moraxella osloensis
attagattagacgttacctg

SEQ ID NO: 37259 - DNA, 20 bp, Campylobacter lari
gtcgaacggagtattaagag

SEQ ID NO: 37260 - DNA, 20 bp, Anaerococcus tetradius
cggagggaattagagatagt

SEQ ID NO: 37261 - DNA, 20 bp, Kocuria kristinae
ccttttgggctggtgtacag

SEQ ID NO: 37262 - DNA, 20 bp, Gemella bergeri
tagtaactatacacaaaaca

SEQ ID NO: 37263 - DNA, 20 bp, Eikenella corrodens
gttgtaaagtacttttgtta

SEQ ID NO: 37264 - DNA, 20 bp, Anaerococcus tetradius
catcatctgacgctgaggta

SEQ ID NO: 37265 - DNA, 20 bp, Bacillus smithii
tcgggggacggagtgacagg

SEQ ID NO: 37266 - DNA, 20 bp, Bacillus alcalophilus
ggctatcactacgggatggg

SEQ ID NO: 37267 - DNA, 20 bp, Weissella paramesenteroides
accaacaaccgcatggttgt

SEQ ID NO: 37268 - DNA, 20 bp, Streptococcus salivarius
ctgttgtaagtcaagaacga

SEQ ID NO: 37269 - DNA, 20 bp, Mannheimia haemolytica
taaagggtgggaccatttgg

SEQ ID NO: 37270 - DNA, 20 bp, Geobacillus thermoglucosidasius
ctggagacagggcgttcctc

SEQ ID NO: 37271 - DNA, 20 bp, Actinomyces neuii
ctgcggaaaaggcagggttt

SEQ ID NO: 37272 - DNA, 20 bp, Bacillus alcalophilus
aagtgccgttcgaataggtc

SEQ ID NO: 37273 - DNA, 20 bp, Clostridium septicum
atcaactccttccgtgccgc

SEQ ID NO: 37274 - DNA, 20 bp, Fusobacterium mortiferum
taccggatattatgtgagtt

SEQ ID NO: 37275 - DNA, 20 bp, Cellulosimicrobium cellulans
gcttgacatgcacgagaagc

SEQ ID NO: 37276 - DNA, 20 bp, Weeksella virosa
caatgggttagcgcctgatc

SEQ ID NO: 37277 - DNA, 20 bp, Bacteroides merdae
tctccaaaccatgtctcagt

SEQ ID NO: 37278 - DNA, 20 bp, Haemophilus segnis
accgcgtagagtcgagagac

SEQ ID NO: 37279 - DNA, 20 bp, Anaerococcus tetradius
atacggagggaattagagat

SEQ ID NO: 37280 - DNA, 20 bp, Chromobacterium violaceum
taacagggtgcttgcaccgc

SEQ ID NO: 37281 - DNA, 20 bp, Corynebacterium group F
gtcggtacagcgcgtttgct

SEQ ID NO: 37282 - DNA, 20 bp, Gemella morbillorum
tgtagtaactatacatgtaa

SEQ ID NO: 37283 - DNA, 20 bp, Campylobacter sputorum
ttgtgaaatctagtagctta

SEQ ID NO: 37284 - DNA, 20 bp, Actinomyces turicensis
cgcagctttgggttgtggtg

SEQ ID NO: 37285 - DNA, 20 bp, Corynebacterium coyleae
tcgtttgtgtaagcccgcag

SEQ ID NO: 37286 - DNA, 20 bp, Delftia acidovorans
cgagaggcccatgacggtac

SEQ ID NO: 37287 - DNA, 20 bp, Haemophilus segnis
taggtgattgacgttaacta

SEQ ID NO: 37288 - DNA, 20 bp, Clostridium paraputrificum
attaccatgtaatgtgggaa

SEQ ID NO: 37289 - DNA, 20 bp, Comamonas terrigena
gctactagagcggccgatgg

SEQ ID NO: 37290 - DNA, 20 bp, Bacillus coagulans
gaggctgttcccctgaggag

SEQ ID NO: 37291 - DNA, 20 bp, Haemophilus segnis
ctatttaagtgaggtgtgaa

SEQ ID NO: 37292 - DNA, 20 bp, Porphyromonas endodontalis
gggactgagaggttgacccc

SEQ ID NO: 37293 - DNA, 20 bp, Streptococcus pyogenes
atccaccaagtgacggtaac

SEQ ID NO: 37294 - DNA, 20 bp, Propionibacterium freudenreichii
ttgacttcggtatagctcca

SEQ ID NO: 37295 - DNA, 20 bp, Brochothrix campestris
aagaacaagggtgagagtaa

SEQ ID NO: 37296 - DNA, 20 bp, Paenibacillus apiarius
gggctcaaccttgggtcgca

SEQ ID NO: 37297 - DNA, 20 bp, Gemella haemolysans
ttgttctgacctttggttag

SEQ ID NO: 37298 - DNA, 20 bp, Bacillus lentus
ttctgggattcgctcatgcg

SEQ ID NO: 37299 - DNA, 20 bp, Streptococcus gordonii
tgcaagtagaacgcacagtt

SEQ ID NO: 37300 - DNA, 20 bp, Methylobacterium extorquens
tcgaacgggcaccttcgggt

SEQ ID NO: 37301 - DNA, 20 bp, Rothia mucilaginosa
taacctacctttaactctgg

SEQ ID NO: 37302 - DNA, 20 bp, Actinomyces bovis
gcacagagatgtgtaatagt

SEQ ID NO: 37303 - DNA, 20 bp, Helcococcus ovis
gacatatacagggatatact

SEQ ID NO: 37304 - DNA, 20 bp, Lactococcus raffinolactis
gtttaataagtctgatgtaa

SEQ ID NO: 37305 - DNA, 20 bp, Bacteroides ureolyticus
tagtctagagtaggggagag

SEQ ID NO: 37306 - DNA, 20 bp, Atopobium parvulum
taaccttttaggagggagac

SEQ ID NO: 37307 - DNA, 20 bp, Facklamia ignava
catgactggaatgggaaaga

SEQ ID NO: 37308 - DNA, 20 bp, Bacillus simplex
cagagtaactgctggtacct

SEQ ID NO: 37309 - DNA, 20 bp, Paenibacillus thiaminolyticus
taactgttccataggtgacg

SEQ ID NO: 37310 - DNA, 20 bp, Campylobacter rectus
actagttgttgcttcgctag

SEQ ID NO: 37311 - DNA, 20 bp, Brevibacillus laterosporus
agcgagggtcttcggaccct

SEQ ID NO: 37312 - DNA, 20 bp, Anaerococcus prevotii
cttgacatactgaggaccgg

SEQ ID NO: 37313 - DNA, 20 bp, Streptococcus alactolyticus
catcactacgagatggacct

SEQ ID NO: 37314 - DNA, 20 bp, Prevotella denticola
ccaaccaccacactaaaggc

SEQ ID NO: 37315 - DNA, 20 bp, Bacillus coagulans
taataccagatagttttttc

SEQ ID NO: 37316 - DNA, 20 bp, Corynebacterium glucuronolyticum
gtaatccaggggcttaactt

SEQ ID NO: 37317 - DNA, 20 bp, Bacteroides fragilis
atgctaatcccaaaatcctc

SEQ ID NO: 37318 - DNA, 20 bp, Comamonas terrigena
gggttaataccctggagtca

SEQ ID NO: 37319 - DNA, 20 bp, Tetragenococcus halophilus
aatgctttttctatgacggt

SEQ ID NO: 37320 - DNA, 20 bp, Streptococcus acidominimus
aaggagcaacagcttcacta

SEQ ID NO: 37321 - DNA, 20 bp, Clostridium botulinum
ggtaggtacaataagacgca

SEQ ID NO: 37322 - DNA, 20 bp, Vibrio cholerae
tttcaaatgcgattcctagg

SEQ ID NO: 37323 - DNA, 20 bp, Campylobacter sputorum
tcctagcttgctaggatgga

SEQ ID NO: 37324 - DNA, 20 bp, Brevibacillus parabrevis
ttgtcagggacgaacacgtg

SEQ ID NO: 37325 - DNA, 20 bp, Facklamia ignava
ttccagtcgcatgactggaa

SEQ ID NO: 37326 - DNA, 20 bp, Lactococcus lactis
tggggaatctgcctttgagc

SEQ ID NO: 37327 - DNA, 20 bp, Campylobacter lari
gttagggaagaaccatgacg

SEQ ID NO: 37328 - DNA, 20 bp, Anaerococcus tetradius
gtgttaggtgtctggaataa

SEQ ID NO: 37329 - DNA, 20 bp, Neisseria meningitidis
gtcccctgctttctctctca

SEQ ID NO: 37330 - DNA, 20 bp, Corynebacterium afermentans
cgaaattctttccagctact

SEQ ID NO: 37331 - DNA, 20 bp, Fusobacterium nucleatum
ggtagggacaacatttggaa

SEQ ID NO: 37332 - DNA, 20 bp, Campylobacter sputorum
tgagtgctaatacctcatac

SEQ ID NO: 37333 - DNA, 20 bp, Actinomyces bovis
atgcgcgcaagcgtaaaact

SEQ ID NO: 37334 - DNA, 20 bp, Enterococcus raffinosus
tgaaagatggccttgctatc

SEQ ID NO: 37335 - DNA, 20 bp, Leuconostoc pseudomesenteroides
taccgaatgaaacttagtgt

SEQ ID NO: 37336 - DNA, 20 bp, Campylobacter rectus
atactctatactccttcttt

SEQ ID NO: 37337 - DNA, 20 bp, Neisseria meningitidis
gctgatattagcaacagcct

SEQ ID NO: 37338 - DNA, 20 bp, Listeria monocytogenes
ataccgaatgataaagtgtg

SEQ ID NO: 37339 - DNA, 20 bp, Streptococcus parasanguinis
ttgcaccgagcggaggagtt

SEQ ID NO: 37340 - DNA, 20 bp, Bacillus licheniformis
cccttaggtcagcggcggac

SEQ ID NO: 37341 - DNA, 20 bp, Prevotella loescheii
gcaatccccgatggcgaccg

SEQ ID NO: 37342 - DNA, 20 bp, Brevundimonas vesicularis
gagagaggtgtgtggaactc

SEQ ID NO: 37343 - DNA, 20 bp, Leuconostoc citreum
tatgggaagaaatgctaaaa

SEQ ID NO: 37344 - DNA, 20 bp, Actinomyces neuii
ttctggattgggatgggctc

SEQ ID NO: 37345 - DNA, 20 bp, Streptococcus constellatus
attctgtgagttgcgaacgg

SEQ ID NO: 37346 - DNA, 20 bp, Streptococcus parasanguinis
cgcataaaagtcgacattgc

SEQ ID NO: 37347 - DNA, 20 bp, Clostridium paraputrificum
ggccggtacaacgagatgca

SEQ ID NO: 37348 - DNA, 20 bp, Prevotella disiens
atacagagatgttgaggtcc

SEQ ID NO: 37349 - DNA, 20 bp, Bacteroides ureolyticus
gctgctaatacctcatactc

SEQ ID NO: 37350 - DNA, 20 bp, Bacteroides thetaiotaomicron
cgcaggcctgaaccagccaa

SEQ ID NO: 37351 - DNA, 20 bp, Clostridium tetani
gtacaggagagggaaacgga

SEQ ID NO: 37352 - DNA, 20 bp, Corynebacterium coyleae
gagctaatcgctgtaaagcc

SEQ ID NO: 37353 - DNA, 20 bp, Prevotella oris
tgtgaaatgcaggtgctcaa

SEQ ID NO: 37354 - DNA, 20 bp, Brevibacillus brevis
ccggataatccttttcctct

SEQ ID NO: 37355 - DNA, 20 bp, Actinomyces bovis
ttatggcggatacaggtggt

SEQ ID NO: 37356 - DNA, 20 bp, Corynebacterium accolens
ttgcttctctggatgagttg

SEQ ID NO: 37357 - DNA, 20 bp, Veillonella atypica
ggatggaaactgctgatcta

SEQ ID NO: 37358 - DNA, 20 bp, Empedobacter brevis
taaatgcataatgacagatc

SEQ ID NO: 37359 - DNA, 20 bp, Bacillus coagulans
cgcatggaggaaaaaggaaa

SEQ ID NO: 37360 - DNA, 20 bp, Prevotella bivia
gttctgctgggcactctgga

SEQ ID NO: 37361 - DNA, 20 bp, Clostridium limosum
ggccgaaggtgggatcgatg

SEQ ID NO: 37362 - DNA, 20 bp, Haemophilus actinemycetemcomitans
agccctggtgcccgaagcta

SEQ ID NO: 37363 - DNA, 20 bp, Campylobacter concisus
atgtcaccgcatggtggtgt

SEQ ID NO: 37364 - DNA, 20 bp, Facklamia hominis
gttagagaagaacgaccgct

SEQ ID NO: 37365 - DNA, 20 bp, Bacteroides distasonis
tacctgaagtccgtaaccga

SEQ ID NO: 37366 - DNA, 20 bp, Pseudoramibacter alactolyticus
aaccggtgacgtgcatttga

SEQ ID NO: 37367 - DNA, 20 bp, Prevotella oris
ttgtgaaatgcaggtgctca

SEQ ID NO: 37368 - DNA, 20 bp, Anaerococcus tetradius
ctcaactatagtaagctttt

SEQ ID NO: 37369 - DNA, 20 bp, Pasteurella trehalosi
ggaaggtgttttgtttaata

SEQ ID NO: 37370 - DNA, 20 bp, Tetragenococcus halophilus
agcccccagctcaactgggg

SEQ ID NO: 37371 - DNA, 20 bp, Propionibacterium acnes
cctaaccgttgtgggggagc

SEQ ID NO: 37372 - DNA, 20 bp, Bacteroides vulgatus
gggtacagagggccgctacc

SEQ ID NO: 37373 - DNA, 20 bp, Pediococcus pentosaceus
gttgttaaagaagaacgtgg

SEQ ID NO: 37374 - DNA, 20 bp, Streptococcus canis
ctaataccgcataaaagtgc

SEQ ID NO: 37375 - DNA, 20 bp, Shewanella algae
ttcgggccttgcgctgatgg

SEQ ID NO: 37376 - DNA, 20 bp, Facklamia ignava
actgttatcagagaagaata

SEQ ID NO: 37377 - DNA, 20 bp, Prevotella intermedia
ggtctgttaagcgtgttgtg

SEQ ID NO: 37378 - DNA, 20 bp, Streptococcus hyovaginalis
agtggaaagtttactctgtg

SEQ ID NO: 37379 - DNA, 20 bp, Propionibacterium freudenreichii
ggttctcagttcggattggg

SEQ ID NO: 37380 - DNA, 20 bp, Arcanobacterium bernardiae
ggggttggaaagggtttctg

SEQ ID NO: 37381 - DNA, 20 bp, Alicyclobacillus acidocaldarius
ctgtgagtccccgcctcaac

SEQ ID NO: 37382 - DNA, 20 bp, Bacteroides thetaiotaomicron
tcgaggggcagcatttcagt

SEQ ID NO: 37383 - DNA, 20 bp, Propionibacterium freudenreichii
gtaatcccgaatatgagcct

SEQ ID NO: 37384 - DNA, 20 bp, Leptotrichia buccalis
gcagacagggataacagacg

SEQ ID NO: 37385 - DNA, 20 bp, Acinetobacter genospecies 3
gcaaagagggcggttaccac

SEQ ID NO: 37386 - DNA, 20 bp, Acinetobacter genospecies 3
tgctactgatcttagcggcg

SEQ ID NO: 37387 - DNA, 20 bp, Leptotrichia buccalis
tctaaggtgtggatagtgat

SEQ ID NO: 37388 - DNA, 20 bp, Pseudoramibacter alactolyticus
agaactggaaagtggcgaac

SEQ ID NO: 37389 - DNA, 20 bp, Listeria welshimeri
ccacggctttgaaagatggt

SEQ ID NO: 37390 - DNA, 20 bp, Acinetobacter calcoaceticus
tcgagcggagtgatggtgct

SEQ ID NO: 37391 - DNA, 20 bp, Corynebacterium xerosis
ccgcaccgtgagggtgtggt

SEQ ID NO: 37392 - DNA, 20 bp, Citrobacter sedlakii
tacttggaggctgtgccctt

SEQ ID NO: 37393 - DNA, 20 bp, Streptococcus gallolyticus
catgttagagacttgaaaga

SEQ ID NO: 37394 - DNA, 20 bp, Porphyromonas endodontalis
atgtactctacgaataagta

SEQ ID NO: 37395 - DNA, 20 bp, Cardiobacterium hominis
gttgcccaagtcagatgtga

SEQ ID NO: 37396 - DNA, 20 bp, Corynebacterium propinquum
cgtttagggagccgtcgaag

SEQ ID NO: 37397 - DNA, 20 bp, Staphylococcus equorum
gttctaaagtaaaagatggt

SEQ ID NO: 37398 - DNA, 20 bp, Anaerobiospirillum succiniciproducens
aggtggagtggaacccacaa

SEQ ID NO: 37399 - DNA, 20 bp, Pseudomonas citronellolis
gtccggaattctgcagagat

SEQ ID NO: 37400 - DNA, 20 bp, Leuconostoc lactis
actgatcaggtagtgacggt

SEQ ID NO: 37401 - DNA, 20 bp, Streptococcus uberis
ggcaaatgcttcactatgag

SEQ ID NO: 37402 - DNA, 20 bp, Comamonas testosteroni
tgtgctactagagcggctga

SEQ ID NO: 37403 - DNA, 20 bp, Fusobacterium nucleatum
gctaatacctgatattatga

SEQ ID NO: 37404 - DNA, 20 bp, Achromobacter xylosoxidans
ggttaataccccgcggaact

SEQ ID NO: 37405 - DNA, 20 bp, Paenibacillus thiaminolyticus
gataactcacggaaacgtgg

SEQ ID NO: 37406 - DNA, 20 bp, Lactococcus garvieae
ctgtagcgcagctaacgcat

SEQ ID NO: 37407 - DNA, 20 bp, Facklamia ignava
gtggagttgcattggaaact

SEQ ID NO: 37408 - DNA, 20 bp, Propionibacterium propionicus
atgttgccagcaagttatgt

SEQ ID NO: 37409 - DNA, 20 bp, Pediococcus dextrinicus
ggcgtaagctgtcacttttg

SEQ ID NO: 37410 - DNA, 20 bp, Acinetobacter lwoffii
ctctagttaatacctaggga

SEQ ID NO: 37411 - DNA, 20 bp, Alcaligenes faecalis
gctgacggtatctgcagaat

SEQ ID NO: 37412 - DNA, 20 bp, Facklamia ignava
aaatcctacgggacaagaag

SEQ ID NO: 37413 - DNA, 20 bp, Helcococcus kunzii
gattaataccttatgataca

SEQ ID NO: 37414 - DNA, 20 bp, Anaerococcus tetradius
ggttgtaaaaatctttttta

SEQ ID NO: 37415 - DNA, 20 bp, Bacteroides forsythus
ggactaatacctcataaaac

SEQ ID NO: 37416 - DNA, 20 bp, Propionibacterium acnes
accgctttcgcctgtgacga

SEQ ID NO: 37417 - DNA, 20 bp, Actinomyces bovis
ggcggctaactggcctgtaa

SEQ ID NO: 37418 - DNA, 20 bp, Cardiobacterium hominis
cttaacttaggagggcgctt

SEQ ID NO: 37419 - DNA, 20 bp, Brevibacillus choshinensis
agtgcgcgaatcccttaaaa

SEQ ID NO: 37420 - DNA, 20 bp, Pseudoramibacter alactolyticus
ccgcaaggactcagcagtcg

SEQ ID NO: 37421 - DNA, 20 bp, Staphylococcus carnosus
agaacaagtgcgtaggtaac

SEQ ID NO: 37422 - DNA, 20 bp, Actinomyces meyeri
acgtgcgtgcatttggttgg

SEQ ID NO: 37423 - DNA, 20 bp, Rothia mucilaginosa
ggggtgttggtggaaagcgt

SEQ ID NO: 37424 - DNA, 20 bp, Facklamia ignava
ggcgcaaacgcaataaacac

SEQ ID NO: 37425 - DNA, 20 bp, Streptococcus alactolyticus
gacatcccagtgaccgctct

SEQ ID NO: 37426 - DNA, 20 bp, Vibrio cholerae
tcaaatgattaaggtattaa

SEQ ID NO: 37427 - DNA, 20 bp, Facklamia sourekii
ctacggctcaaccgtagaag

SEQ ID NO: 37428 - DNA, 20 bp, Bacteroides fragilis
catcaggaagaaagcttgct

SEQ ID NO: 37429 - DNA, 20 bp, Dietzia maris
ccacgggatctgtgccgtag

SEQ ID NO: 37430 - DNA, 20 bp, Neisseria sicca
ccctccagagacggaggggt

SEQ ID NO: 37431 - DNA, 20 bp, Chryseobacterium meningosepticum
ttacgtgtaagtagctgaag

SEQ ID NO: 37432 - DNA, 20 bp, Prevotella intermedia
cggtacagagggacggtgcg

SEQ ID NO: 37433 - DNA, 20 bp, Bacteroides thetaiotaomicron
taatacccgatggtataatc

SEQ ID NO: 37434 - DNA, 20 bp, Anaerobiospirillum succiniciproducens
gcatgtaggcggaaaggtaa

SEQ ID NO: 37435 - DNA, 20 bp, Peptostreptococcus anaerobius
gccctatacacatggataac

SEQ ID NO: 37436 - DNA, 20 bp, Vibrio cholerae
tcaaatgattaaggtattag

SEQ ID NO: 37437 - DNA, 20 bp, Cardiobacterium hominis
tttgaaactgggcgactaga

SEQ ID NO: 37438 - DNA, 20 bp, Bacteroides uniformis
tgagtacagtagaggcaggc

SEQ ID NO: 37439 - DNA, 20 bp, Clostridium tetani
ttaaccaaaggagtaatctg

SEQ ID NO: 37440 - DNA, 20 bp, Bacteroides ovatus
gctctatgggtcgtaaactt

SEQ ID NO: 37441 - DNA, 20 bp, Propionibacterium freudenreichii
ggagaatggaactctcggtg

SEQ ID NO: 37442 - DNA, 20 bp, Facklamia ignava
gctttgatgcatagccgacc

SEQ ID NO: 37443 - DNA, 20 bp, Prevotella denticola
cgtctgaattgcagcgcata

SEQ ID NO: 37444 - DNA, 20 bp, Gemella bergeri
aaggtcattggaaactgata

SEQ ID NO: 37445 - DNA, 20 bp, Campylobacter sputorum
tgctaatacctcatactcca

SEQ ID NO: 37446 - DNA, 20 bp, Haemophilus actinomycetomicans
gggccgcatgccatgagatg

SEQ ID NO: 37447 - DNA, 20 bp, Burkholderia multivorans
ttggctctaatacagtcggg

SEQ ID NO: 37448 - DNA, 20 bp, Actinomyces radingae
agagggtgggcggtcacatt

SEQ ID NO: 37449 - DNA, 20 bp, Campylobacter sputorum
taggctgagcactctaaaca

SEQ ID NO: 37450 - DNA, 20 bp, Paenibacillus pabuli
cctgccctcaagtttgggac

SEQ ID NO: 37451 - DNA, 20 bp, Vibrio cholerae
attaaggtattaacttaacc

SEQ ID NO: 37452 - DNA, 20 bp, Pasteurella multocida
taatgaggaagggatgttgt

SEQ ID NO: 37453 - DNA, 20 bp, Bacteroides capilosus
ggtgggttcgataattgggg

SEQ ID NO: 37454 - DNA, 20 bp, Burkholderia multivorans
aaagaaatccctggctctaa

SEQ ID NO: 37455 - DNA, 20 bp, Serratia marcescens
ttaatacgttcatcaattga

SEQ ID NO: 37456 - DNA, 20 bp, Lactococcus garvieae
ggtgcgctaatctcttaaaa

SEQ ID NO: 37457 - DNA, 20 bp, Porphyromonas levii
tcgtttttatattaaagctc

SEQ ID NO: 37458 - DNA, 20 bp, Lactococcus lactis
gggaatctgcctttgagcgg

SEQ ID NO: 37459 - DNA, 20 bp, Streptococcus hyovaginalis
actctgtgacggtagcttat

SEQ ID NO: 37460 - DNA, 20 bp, Tissierella praeacuta
ttaaatgtcgcatgagattt

SEQ ID NO: 37461 - DNA, 20 bp, Lactococcus garvieae
taaggtaagaccgatgactg

SEQ ID NO: 37462 - DNA, 20 bp, Actinomyces bovis
ggaagaacgataggaagagg

SEQ ID NO: 37463 - DNA, 20 bp, Staphylococcus succinus
ctaccttgtacgacttcacc

SEQ ID NO: 37464 - DNA, 20 bp, Gemella haemolysans
ttgtgttgttctgacctttg

SEQ ID NO: 37465 - DNA, 20 bp, Corynebacterium striatum
gtcctcccttgtggtttgta

SEQ ID NO: 37466 - DNA, 20 bp, Tetragenococcus halophilus
acacccaaagtcggtgcggc

SEQ ID NO: 37467 - DNA, 20 bp, Corynebacterium macginleyi
gaagccggtggcctaaacgt

SEQ ID NO: 37468 - DNA, 20 bp, Clostridium glycolicum
ctcatacacatggataacat

SEQ ID NO: 37469 - DNA, 20 bp, Streptococcus hyovaginalis
gaagaacgggagtaagagtg

SEQ ID NO: 37470 - DNA, 20 bp, Moraxella lacunata
aaagcgagcgtaggtggtca

SEQ ID NO: 37471 - DNA, 20 bp, Alicyclobacillus acidocaldarius
cactcggtaccgtctcgcat

SEQ ID NO: 37472 - DNA, 20 bp, Morganella morganii
acccgggaattgcatctgat

SEQ ID NO: 37473 - DNA, 20 bp, Anaerococcus prevotii
ctgccttagacattgggata

SEQ ID NO: 37474 - DNA, 20 bp, Peptoniphilus indolicus
cggggacagtattacaggtg

SEQ ID NO: 37475 - DNA, 20 bp, Streptococcus sp.
gcataaaattgattattgca

SEQ ID NO: 37476 - DNA, 20 bp, Lactobacillus casei
aaatccaagaaccgcatggt

SEQ ID NO: 37477 - DNA, 20 bp, Moraxella bovis
gctagatatgattagtggcg

SEQ ID NO: 37478 - DNA, 20 bp, Streptococcus parasanguinis
aaagtcgacattgcatgatg

SEQ ID NO: 37479 - DNA, 20 bp, Ochrobactrum intermedium
gaggtgaaagatttatcggt

SEQ ID NO: 37480 - DNA, 20 bp, Alcaligenes faecalis
cgtgtgtaggcggttcggaa

SEQ ID NO: 37481 - DNA, 20 bp, Nocardia asteroides
cctcgcgagaggatgctaat

SEQ ID NO: 37482 - DNA, 20 bp, Helcococcus ovis
tgtccttagtgaagataatg

SEQ ID NO: 37483 - DNA, 20 bp, Stenotrophomonas maltophilia
tggatactgggcgactagaa

SEQ ID NO: 37484 - DNA, 20 bp, Streptococcus bovis
gctagagtagaaggagttgc

SEQ ID NO: 37485 - DNA, 20 bp, Alicyclobacillus acidocaldarius
tggggtgtgtccccccaaca

SEQ ID NO: 37486 - DNA, 20 bp, Facklamia ignava
aacgcgccgagaagggaact

SEQ ID NO: 37487 - DNA, 20 bp, Pseudoramibacter alactolyticus
tcgggtgaaattagaactgg

SEQ ID NO: 37488 - DNA, 20 bp, Eggerthella lenta
gggatctctaatccgagggc

SEQ ID NO: 37489 - DNA, 20 bp, Alicyclobacillus acidocaldarius
cccgcaagaagatgcctcct

SEQ ID NO: 37490 - DNA, 20 bp, Pediococcus inopinatus
ggagtaaccttcgggagcta

SEQ ID NO: 37491 - DNA, 20 bp, Corynebacterium glucuronolyticum
atggctggtacagtgcgtgt

SEQ ID NO: 37492 - DNA, 20 bp, Anaerococcus prevotii
gcagtagcttaactactgta

SEQ ID NO: 37493 - DNA, 20 bp, Vibrio cholerae
atgattaaggtattaactta

SEQ ID NO: 37494 - DNA, 20 bp, Plesiomonas shigelloides
atgctatcggatgaacccag

SEQ ID NO: 37495 - DNA, 20 bp, Lactococcus garvieae
aggagggcgcttcctaaggt

SEQ ID NO: 37496 - DNA, 20 bp, Pasteurella multocida
aaatagatagcatcattgac

SEQ ID NO: 37497 - DNA, 20 bp, Campylobacter concisus
agtacaatgggttgcgatgc

SEQ ID NO: 37498 - DNA, 20 bp, Bacteroides vulgatus
agtggatgccaatccccaaa

SEQ ID NO: 37499 - DNA, 20 bp, Bacteroides forsythus
tgtaccttgtgaataagcat

SEQ ID NO: 37500 - DNA, 20 bp, Propionibacterium propionicus
ccatgacgaagcttttgtga

SEQ ID NO: 37501 - DNA, 20 bp, Anaerobiospirillum succiniciproducens
tggggcgtacagagggaaac

SEQ ID NO: 37502 - DNA, 20 bp, Bacillus oleronius
tcctcttgacctccctagag

SEQ ID NO: 37503 - DNA, 20 bp, Prevotella melaninogenica
acggcattgagtgcttgcac

SEQ ID NO: 37504 - DNA, 20 bp, Leptotrichia buccalis
tagttcactggacggtaact

SEQ ID NO: 37505 - DNA, 20 bp, Brochothrix campestris
gataatacaaagggtcgcga

SEQ ID NO: 37506 - DNA, 20 bp, Citrobacter sedlakii
gactgcagagatgcggttgt

SEQ ID NO: 37507 - DNA, 20 bp, Streptococcus porcinus
agtctaatgagttgcgaacg

SEQ ID NO: 37508 - DNA, 20 bp, Clostridium tetani
aggagtaatctgctttgaga

SEQ ID NO: 37509 - DNA, 20 bp, Clostridium glycolicum
cgagcgattcacttcggtga

SEQ ID NO: 37510 - DNA, 20 bp, Tetragenococcus halophilus
gtcactgatggctggtcccg

SEQ ID NO: 37511 - DNA, 20 bp, Peptostreptococcus anaerobius
gtaggtggtctttcaagtcg

SEQ ID NO: 37512 - DNA, 20 bp, Comamonas terrigena
tgagaactgaggttgaaagc

SEQ ID NO: 37513 - DNA, 20 bp, Bacteroides fragilis
tcattattaaaggattccgg

SEQ ID NO: 37514 - DNA, 20 bp, Veillonella dispar
gggacgaaaggccttcttgc

SEQ ID NO: 37515 - DNA, 20 bp, Leuconostoc lactis
aagaatgtatctgatagtaa

SEQ ID NO: 37516 - DNA, 20 bp, Aerococcus christensenii
tacaacgggcagcgagctcg

SEQ ID NO: 37517 - DNA, 20 bp, Clostridium tetani
gctgcatttcaaactgggca

SEQ ID NO: 37518 - DNA, 20 bp, Bacteroides capilosus
cgggctcaacctgtggcctg

SEQ ID NO: 37519 - DNA, 20 bp, Acinetobacter haemolyticus
gagcggggaagggtagcttg

SEQ ID NO: 37520 - DNA, 20 bp, Prevotella denticola
ccaccacactaaaggcagtt

SEQ ID NO: 37521 - DNA, 20 bp, Sporosarcina pasteurii
tatatctctataccggtcag

SEQ ID NO: 37522 - DNA, 20 bp, Bacteroides forsythus
gggcgaccggatgccaatct

SEQ ID NO: 37523 - DNA, 20 bp, Fusobacterium varium
tagtacagagagctgcaaac

SEQ ID NO: 37524 - DNA, 20 bp, Gemella morbillorum
tggtgcttgcactagaaaaa

SEQ ID NO: 37525 - DNA, 20 bp, Acinetobacter calcoaceticus
ggagtgatggtgcttgcact

SEQ ID NO: 37526 - DNA, 20 bp, Facklamia ignava
cgcgccgagaagggaacttg

SEQ ID NO: 37527 - DNA, 20 bp, Acinetobacter haemolyticus
aagggtagcttgctacctaa

SEQ ID NO: 37528 - DNA, 20 bp, Sporosarcina pasteurii
cctgtacttgttcttccctc

SEQ ID NO: 37529 - DNA, 20 bp, Salmonella enteritidis
atccacagaagaatccagag

SEQ ID NO: 37530 - DNA, 20 bp, Corynebacterium falsenii
tgcaggatcgctgcagagat

SEQ ID NO: 37531 - DNA, 20 bp, Leptotrichia buccalis
atctaggcggccagacaagt

SEQ ID NO: 37532 - DNA, 20 bp, Rhodococcus equi
ctggataggaccgcacttta

SEQ ID NO: 37533 - DNA, 20 bp, Burkholderia multivorans
aaatccctggctctaataca

SEQ ID NO: 37534 - DNA, 20 bp, Actinobacillus ureae
ttggctcatggagggggata

SEQ ID NO: 37535 - DNA, 20 bp, Anaerococcus tetradius
ttaagcaaaactcaaaaagc

SEQ ID NO: 37536 - DNA, 20 bp, Alcaligenes faecalis
ctagctgttggggccgttag

SEQ ID NO: 37537 - DNA, 20 bp, Fusobacterium nucleatum
atttcagtgtcccttcgggg

SEQ ID NO: 37538 - DNA, 20 bp, Eggerthella lenta
ctcaagcgggatctctaatc

SEQ ID NO: 37539 - DNA, 20 bp, Pediococcus pentosaceus
aagtcgaacgaacttccgtt

SEQ ID NO: 37540 - DNA, 20 bp, Chryseobacterium meningosepticum
ggcagctacctagcgatagg

SEQ ID NO: 37541 - DNA, 20 bp, Corynebacterium afermentans
tcagcgtcagttcggcccag

SEQ ID NO: 37542 - DNA, 20 bp, Gemella haemolysans
ggaacaaagagaagcgagct

SEQ ID NO: 37543 - DNA, 20 bp, Acinetobacter haemolyticus
ctggtcagctagagtatggg

SEQ ID NO: 37544 - DNA, 20 bp, Moraxella osloensis
taatattgacactgagattc

SEQ ID NO: 37545 - DNA, 20 bp, Pasteurella trehalosi
gtgataaatcaaccgcctgg

SEQ ID NO: 37546 - DNA, 20 bp, Chromobacterium violaceum
gtgtaatgggggatagctcg

SEQ ID NO: 37547 - DNA, 20 bp, Cardiobacterium hominis
acgatggagcttgctccagg

SEQ ID NO: 37548 - DNA, 20 bp, Streptococcus bovis
gtagaacgctgactacttta

SEQ ID NO: 37549 - DNA, 20 bp, Neisseria polysaccharea
ctaatatcagcggctgatga

SEQ ID NO: 37550 - DNA, 20 bp, Geobacillus thermoglucosidasius
accctggagacagggcgttc

SEQ ID NO: 37551 - DNA, 20 bp, Streptococcus agalactiae
accaagtgacggtaactaac

SEQ ID NO: 37552 - DNA, 20 bp, Leuconostoc mesenteroides
gcagacggtttattaagtct

SEQ ID NO: 37553 - DNA, 20 bp, Neisseria subflava
gatagggttaatacccctgt

SEQ ID NO: 37554 - DNA, 20 bp, Gemella haemolysans
ttgctaacactatgagatgg

SEQ ID NO: 37555 - DNA, 20 bp, Bacillus coagulans
tttcctccgcatggaggaaa

SEQ ID NO: 37556 - DNA, 20 bp, Chromobacterium violaceum
gagtaatgcgtcggaatgta

SEQ ID NO: 37557 - DNA, 20 bp, Chryseobacterium meningosepticum
ataaacctacttacgtgtaa

SEQ ID NO: 37558 - DNA, 20 bp, Streptococcus parauberis
aaatttaaaaggagcaattg

SEQ ID NO: 37559 - DNA, 20 bp, Haemophilus actinemycetemcomitans
taaccaaccagcgatgggga

SEQ ID NO: 37560 - DNA, 20 bp, Corynebacterium afermentans
gagaccttgcggggcgactg

SEQ ID NO: 37561 - DNA, 20 bp, Bacteroides thetaiotaomicron
cttaaattgcatttgaatat

SEQ ID NO: 37562 - DNA, 20 bp, Facklamia ignava
ctgtcactgaaggatggtcc

SEQ ID NO: 37563 - DNA, 20 bp, Anaerococcus tetradius
ctatataaagcttttaaaac

SEQ ID NO: 37564 - DNA, 20 bp, Leptotrichia buccalis
acaagtctggggtgaaaact

SEQ ID NO: 37565 - DNA, 20 bp, Paenibacillus glucanolyticus
atgtgataatgaaagacgga

SEQ ID NO: 37566 - DNA, 20 bp, Neisseria cinerea
gcaaggggtccgcttaccac

SEQ ID NO: 37567 - DNA, 20 bp, Prevotella melaninogenica
gcatcaaatcttgaaagccg

SEQ ID NO: 37568 - DNA, 20 bp, Turicella otitidis
ccggataggagccattttta

SEQ ID NO: 37569 - DNA, 20 bp, Actinomyces bovis
agaaattcagtgctgtagtt

SEQ ID NO: 37570 - DNA, 20 bp, Bacillus lentus
ttcgctcatgcgtcgccgct

SEQ ID NO: 37571 - DNA, 20 bp, Neisseria polysaccharea
tgggtgactcgagtgtgtca

SEQ ID NO: 37572 - DNA, 20 bp, Rhizobium radiobacter
ggggtttgggcagtggagac

SEQ ID NO: 37573 - DNA, 20 bp, Leptotrichia buccalis
agtgctggagaggtggacgg

SEQ ID NO: 37574 - DNA, 20 bp, Pediococcus dextrinicus
tgcaagtcgaacgagtttgc

SEQ ID NO: 37575 - DNA, 20 bp, Streptococcus hyovaginalis
agtttactctgtgacggtag

SEQ ID NO: 37576 - DNA, 20 bp, Corynebacterium xerosis
cagcttgctgcgggtactcg

SEQ ID NO: 37577 - DNA, 20 bp, Bacillus sp
ctgtaagactaggataactc

SEQ ID NO: 37578 - DNA, 20 bp, Lactococcus garvieae
aaggagttccttcgggacac

SEQ ID NO: 37579 - DNA, 20 bp, Aerococcus viridans
gattgaaagacggctctgct

SEQ ID NO: 37580 - DNA, 20 bp, Haemophilus actinemycetemcomitans
tttagccctggtgcccgaag

SEQ ID NO: 37581 - DNA, 20 bp, Anaerococcus prevotii
ttaataccaaatgaaatcac

SEQ ID NO: 37582 - DNA, 20 bp, Neisseria meningitidis
acactcgagtcacccagttc

SEQ ID NO: 37583 - DNA, 20 bp, Prevotella intermedia
caaaagccatgcgactctca

SEQ ID NO: 37584 - DNA, 20 bp, Haemophilus influenzae
taactctggcgcccgtagct

SEQ ID NO: 37585 - DNA, 20 bp, Paenibacillus validus
gaatccttagaagccggtct

SEQ ID NO: 37586 - DNA, 20 bp, Actinomyces odontolyticus
atgcacggcggcactgcaga

SEQ ID NO: 37587 - DNA, 20 bp, Prevotella bivia
acccataactaagggataac

SEQ ID NO: 37588 - DNA, 20 bp, Aerococcus viridans
agatgaagtgcttgcacttc

SEQ ID NO: 37589 - DNA, 20 bp, Prevotella bivia
ttacaatgggtggtacagat

SEQ ID NO: 37590 - DNA, 20 bp, Bacillus schlegellii
tttaggaggggcctgcggcg

SEQ ID NO: 37591 - DNA, 20 bp, Vibrio cholerae
tccagcgtctccgctagatt

SEQ ID NO: 37592 - DNA, 20 bp, Prevotella disiens
acgatacagagatgttgagg

SEQ ID NO: 37593 - DNA, 20 bp, Morganella morganii
gttgattgagtcagatgtga

SEQ ID NO: 37594 - DNA, 20 bp, Arcanobacterium bernardiae
aggcctttttggttgagggt

SEQ ID NO: 37595 - DNA, 20 bp, Campylobacter curvus
ctagttgttgctaagctagt

SEQ ID NO: 37596 - DNA, 20 bp, Paenibacillus thiaminolyticus
ggagagtaactgttccatag

SEQ ID NO: 37597 - DNA, 20 bp, Tissierella praeacuta
cgagcagctacttagcgata

SEQ ID NO: 37598 - DNA, 20 bp, Corynebacterium auris
ggtggagctaatcgctagaa

SEQ ID NO: 37599 - DNA, 20 bp, Actinomyces bovis
tgtaatagttatggcggata

SEQ ID NO: 37600 - DNA, 20 bp, Corynebacterium seminale
cccatggcccaaccggttta

SEQ ID NO: 37601 - DNA, 20 bp, Bacteroides thetaiotaomicron
acgtgtggaattttgtatgt

SEQ ID NO: 37602 - DNA, 20 bp, Streptococcus pyogenes
ctaataccgcataagagaga

SEQ ID NO: 37603 - DNA, 20 bp, Prevotella bivia
ataatgaggtccttcgggac

SEQ ID NO: 37604 - DNA, 20 bp, Yersinia ruckeri
tgttaatagcactgaacatt

SEQ ID NO: 37605 - DNA, 20 bp, Clostridium glycolicum
gtggtttcttaagtcaggag

SEQ ID NO: 37606 - DNA, 20 bp, Anaerococcus tetradius
aactatataaagcttttaaa

SEQ ID NO: 37607 - DNA, 20 bp, Gemella bergeri
tacacaaaacagacggtacc

SEQ ID NO: 37608 - DNA, 20 bp, Anaerococcus tetradius
aaaactgctcatcttgaggt

SEQ ID NO: 37609 - DNA, 20 bp, Bacteroides thetaiotaomicron
ttattattaaagaatttcgg

SEQ ID NO: 37610 - DNA, 20 bp, Prevotella melaninogenica
caaattgcatcaaatcttga

SEQ ID NO: 37611 - DNA, 20 bp, Veillonella atypica
gagaaacactctctcagttc

SEQ ID NO: 37612 - DNA, 20 bp, Oligella ureolytica
gtagttgaggaataagcacc

SEQ ID NO: 37613 - DNA, 20 bp, Proteus vulgaris
ggtgataaagttaatacctt

SEQ ID NO: 37614 - DNA, 20 bp, Streptococcus suis
ataacagtatttaccgcatg

SEQ ID NO: 37615 - DNA, 20 bp, Haemophilus ducreyi
cctttgttgccagcatgtag

SEQ ID NO: 37616 - DNA, 20 bp, Anaerobiospirillum succiniciproducens
ggaacctacagacaggtgct

SEQ ID NO: 37617 - DNA, 20 bp, Prevotella melaninogenica
agtacgcacaacgttggcgg

SEQ ID NO: 37618 - DNA, 20 bp, Tissierella praeacuta
atttggaggcagctgtcgaa

SEQ ID NO: 37619 - DNA, 20 bp, Leptotrichia buccalis
aacgactgataatacctgat

SEQ ID NO: 37620 - DNA, 20 bp, Bacteroides vulgatus
gcgagtggatgccaatccca

SEQ ID NO: 37621 - DNA, 20 bp, Bacteroides vulgatus
gcgagtggatgccaatcccc

SEQ ID NO: 37622 - DNA, 20 bp, Acinetobacter calcoaceticus
ataccttcagatagtggacg

SEQ ID NO: 37623 - DNA, 20 bp, Propionibacterium propionicus
gaaacgtctagagataggcg

SEQ ID NO: 37624 - DNA, 20 bp, Facklamia ignava
gcctgtagagtaactgttat

SEQ ID NO: 37625 - DNA, 20 bp, Pediococcus inopinatus
ggacgcactttcgttgaatg

SEQ ID NO: 37626 - DNA, 20 bp, Anaerobiospirillum succiniciproducens
cgattaccacggtgtggtct

SEQ ID NO: 37627 - DNA, 20 bp, Morganella morganii
tcgggcctcgcaccatcaga

SEQ ID NO: 37628 - DNA, 20 bp, Streptococcus sobrinus
aaagaagccattgcttcact

SEQ ID NO: 37629 - DNA, 20 bp, Actinomyces naeslundii
attctgggtctgtcgcatgg

SEQ ID NO: 37630 - DNA, 20 bp, Facklamia sourekii
cctacggctcaaccgtagaa

SEQ ID NO: 37631 - DNA, 20 bp, Delftia acidovorans
aaaagcttctcctaatacga

SEQ ID NO: 37632 - DNA, 20 bp, Bacillus sp
ggcgcaagctgtcacttaca

SEQ ID NO: 37633 - DNA, 20 bp, Paenibacillus amylolyticus
ataccggataatttattttc

SEQ ID NO: 37634 - DNA, 20 bp, Photobacterium damselae
agggaggaaggtagtgtagt

SEQ ID NO: 37635 - DNA, 20 bp, Leuconostoc lactis
accgcataaaacctaacacc

SEQ ID NO: 37636 - DNA, 20 bp, Clostridium clostridiiforme
tttggaaactgttttgctag

SEQ ID NO: 37637 - DNA, 20 bp, Streptococcus dysgalactiae
ggtgggagtggaaaatccac

SEQ ID NO: 37638 - DNA, 20 bp, Gemella bergeri
gttagggaagaaaggttgtg

SEQ ID NO: 37639 - DNA, 20 bp, Haemophilus actinemycetemcomitans
ttggggatgtactgacgctg

SEQ ID NO: 37640 - DNA, 20 bp, Abiotrophia defectiva
ctatgcgtgtgacggtatct

SEQ ID NO: 37641 - DNA, 20 bp, Staphylococcus auricularis
agaacaaatgcgtaagtaac

SEQ ID NO: 37642 - DNA, 20 bp, Propionibacterium freudenreichii
tagctccaggaaactggtgg

SEQ ID NO: 37643 - DNA, 20 bp, Chromobacterium violaceum
agtgagtttcaccagaagtg

SEQ ID NO: 37644 - DNA, 20 bp, Prevotella intermedia
caatggacgtaagtctgaac

SEQ ID NO: 37645 - DNA, 20 bp, Arcanobacterium bernardiae
tgctttcatcgcatggtggg

SEQ ID NO: 37646 - DNA, 20 bp, Neisseria meningitidis
tctgacacactcgagtcacc

SEQ ID NO: 37647 - DNA, 20 bp, Unknown Organism
  oligonucleotide from CDC group EF-4B
gcatacactttgagaaggaa

SEQ ID NO: 37648 - DNA, 20 bp, Campylobacter curvus
tgttgctgagctagtcttgg

SEQ ID NO: 37649 - DNA, 20 bp, Streptococcus hyovaginalis
aacgggagtaagagtggaaa

SEQ ID NO: 37650 - DNA, 20 bp, Staphylococcus pulvereri
gagtaaccttttattaggag

SEQ ID NO: 37651 - DNA, 20 bp, Bacteroides thetaiotaomicron
aaggcaaatgtgaaggtgct

SEQ ID NO: 37652 - DNA, 20 bp, Tissierella praeacuta
cagctgtcgaaggtagggtc

SEQ ID NO: 37653 - DNA, 20 bp, Weeksella virosa
ttaacgatagaactgccatt

SEQ ID NO: 37654 - DNA, 20 bp, Anaerobiospirillum succiniciproducens
ccttacggcagggctacaca

SEQ ID NO: 37655 - DNA, 20 bp, Bacillus alcalophilus
aaagatggctccggctatca

SEQ ID NO: 37656 - DNA, 20 bp, Aerococcus christensenii
cagagaaagtgcttgcactt

SEQ ID NO: 37657 - DNA, 20 bp, Bacillus schlegellii
ccggagttcacacattaagc

SEQ ID NO: 37658 - DNA, 20 bp, Shewanella algae
gggtgtaagttaatacctta

SEQ ID NO: 37659 - DNA, 20 bp, Weeksella virosa
agaaatagatttttcttcgg

SEQ ID NO: 37660 - DNA, 20 bp, Gemella morbillorum
tagaaaaacttagcggcgaa

SEQ ID NO: 37661 - DNA, 20 bp, Bacteroides uniformis
catagttcttccgcatggta

SEQ ID NO: 37662 - DNA, 20 bp, Facklamia ignava
cctacccttcagcgggggat

SEQ ID NO: 37663 - DNA, 20 bp, Bacteroides uniformis
catagttcttccgcatggtg

SEQ ID NO: 37664 - DNA, 20 bp, Actinomyces bovis
taggaagagggaatgcttct

SEQ ID NO: 37665 - DNA, 20 bp, Leuconostoc lactis
gagaagaatgtatctgatag

SEQ ID NO: 37666 - DNA, 20 bp, Brochothrix campestris
gagaaatcgatgctaatacc

SEQ ID NO: 37667 - DNA, 20 bp, Eggerthella lenta
cgggatctctaatccgaggg

SEQ ID NO: 37668 - DNA, 20 bp, Clostridium botulinum
aggtacaataagacgcaaga

SEQ ID NO: 37669 - DNA, 20 bp, Alicyclobacillus acidocaldarius
cgggcgtatccggcattagc

SEQ ID NO: 37670 - DNA, 20 bp, Citrobacter koseri
ctgtgccttcgggagccgtg

SEQ ID NO: 37671 - DNA, 20 bp, Neisseria polysaccharea
aatatcagcggctgatgacg

SEQ ID NO: 37672 - DNA, 20 bp, Enterococcus casseliflavus
ggaagaaagttgaaaggcgc

SEQ ID NO: 37673 - DNA, 20 bp, Clostridium ramosum
ataagtaacctgccctagac

SEQ ID NO: 37674 - DNA, 20 bp, Propionibacterium freudenreichii
ctttttggctggtacacagg

SEQ ID NO: 37675 - DNA, 20 bp, Propionibacterium freudenreichii
cggttgatcacgtcggaagt

SEQ ID NO: 37676 - DNA, 20 bp, Veillonella atypica
gtgatgggatggaaactgcc

SEQ ID NO: 37677 - DNA, 20 bp, Anaerococcus prevotii
ccttcggggtgaagataaga

SEQ ID NO: 37678 - DNA, 20 bp, Streptococcus porcinus
gtcatctacttaaaaggggc

SEQ ID NO: 37679 - DNA, 20 bp, Brevibacterium epidermidis
gtacagagagaggcgaaccc

SEQ ID NO: 37680 - DNA, 20 bp, Paenibacillus macerans
ctcctgagagttagcggcgg

SEQ ID NO: 37681 - DNA, 20 bp, Corynebacterium glucuronolyticum
gtttttctggtgtgggatga

SEQ ID NO: 37682 - DNA, 20 bp, Streptococcus parasanguinis
atgatgttgacttgaaaggt

SEQ ID NO: 37683 - DNA, 20 bp, Veillonella atypica
gtgatgggatggaaactgct

SEQ ID NO: 37684 - DNA, 20 bp, Myroides odoratus
aattgccgttgatactgctt

SEQ ID NO: 37685 - DNA, 20 bp, Streptococcus thoraltensis
caacgagttgcgagctggtg

SEQ ID NO: 37686 - DNA, 20 bp, Pseudomonas fluorescens
gaagggtacttacctaatac

SEQ ID NO: 37687 - DNA, 20 bp, Virgibacillus pantothenticus
cgcccctagagatagggagt

SEQ ID NO: 37688 - DNA, 20 bp, Actinomyces meyeri
ttcactggtcttcgcatggg

SEQ ID NO: 37689 - DNA, 20 bp, Veillonella parvula
cagttagaaggattgacggt

SEQ ID NO: 37690 - DNA, 20 bp, Micrococcus luteus
agcgcccaccgcatggtggg

SEQ ID NO: 37691 - DNA, 20 bp, Corynebacterium coyleae
gctcctgcttgcaggggtac

SEQ ID NO: 37692 - DNA, 20 bp, Propionibacterium acnes
agtgtaatcttggggcttaa

SEQ ID NO: 37693 - DNA, 20 bp, Peptostreptococcus anaerobius
attatccaaccgcaaggagg

SEQ ID NO: 37694 - DNA, 20 bp, Streptococcus agalactiae
ataccgcataagagtaatta

SEQ ID NO: 37695 - DNA, 20 bp, Pseudoramibacter alactolyticus
gagaaggttttgaatgatcc

SEQ ID NO: 37696 - DNA, 20 bp, Finegoldia magna
atcgtaaagttctgtcctat

SEQ ID NO: 37697 - DNA, 20 bp, Tissierella praeacuta
gtttttaaagaagatttctt

SEQ ID NO: 37698 - DNA, 20 bp, Streptococcus hyovaginalis
ttaatgatttaaaaggagca

SEQ ID NO: 37699 - DNA, 20 bp, Oligella urethralis
cttacgatccccctctttcc

SEQ ID NO: 37700 - DNA, 20 bp, Pediococcus dextrinicus
aatctctaaaagctagtctc

SEQ ID NO: 37701 - DNA, 20 bp, Actinomyces bovis
cggctaactggcctgtaact

SEQ ID NO: 37702 - DNA, 20 bp, Streptococcus hyovaginalis
ctctgtgacggtagcttatc

SEQ ID NO: 37703 - DNA, 20 bp, Proteus vulgaris
ttgcatctgaaactggttgg

SEQ ID NO: 37704 - DNA, 20 bp, Burkholderia multivorans
tctaatacagtcgggggatg

SEQ ID NO: 37705 - DNA, 20 bp, Virgibacillus pantothenticus
gggtgacgcttgtggaacga

SEQ ID NO: 37706 - DNA, 20 bp, Oligella urethralis
gcatcttaaggtattagcct

SEQ ID NO: 37707 - DNA, 20 bp, Peptostreptococcus anaerobius
tatatatttacggcatcgta

SEQ ID NO: 37708 - DNA, 20 bp, Paenibacillus amylolyticus
accttggttcgcactggaaa

SEQ ID NO: 37709 - DNA, 20 bp, Streptococcus agalactiae
acgctgaggtttggtgttta

SEQ ID NO: 37710 - DNA, 20 bp, Corynebacterium glucuronolyticum
tgtgagattgggctagagat

SEQ ID NO: 37711 - DNA, 20 bp, Chryseobacterium meningosepticum
aaggcaggtcactaagtctt

SEQ ID NO: 37712 - DNA, 20 bp, Prevotella bivia
ccttcgggacatctgtgaag

SEQ ID NO: 37713 - DNA, 20 bp, Anaerococcus tetradius
aagcaagttagaagtgaaat

SEQ ID NO: 37714 - DNA, 20 bp, Cardiobacterium hominis
ggtgggaactgtaaggagac

SEQ ID NO: 37715 - DNA, 20 bp, Haemophilus haemolyticus
agagggtggcgaaactgcga

SEQ ID NO: 37716 - DNA, 20 bp, Collinsella aerofaciens
ggggggacgatccccccgtg

SEQ ID NO: 37717 - DNA, 20 bp, Alloiococcus otitis
gagtgaagaaggacttcggt

SEQ ID NO: 37718 - DNA, 20 bp, Eggerthella lenta
cggccggatcccgaactggg

SEQ ID NO: 37719 - DNA, 20 bp, Proteus vulgaris
atactcttagcaattgacgt

SEQ ID NO: 37720 - DNA, 20 bp, Burkholderia gladioli
ggctaatatccttcggggat

SEQ ID NO: 37721 - DNA, 20 bp, Bacteroides thetaiotaomicron
ataatcagaccgcatggtct

SEQ ID NO: 37722 - DNA, 20 bp, Paenibacillus validus
atagctggtttctccgcatg

SEQ ID NO: 37723 - DNA, 20 bp, Prevotella oris
ggagcgtaggccgtggatta

SEQ ID NO: 37724 - DNA, 20 bp, Achromobacter xylosoxidans
aaacgtcgcgggttaatacc

SEQ ID NO: 37725 - DNA, 20 bp, Enterococcus avium
gtttgaaaggcgcttttgcg

SEQ ID NO: 37726 - DNA, 20 bp, Moraxella osloensis
actggtggtgctagaatatg

SEQ ID NO: 37727 - DNA, 20 bp, Helcococcus kunzii
aatggtctgaacaaagcgca

SEQ ID NO: 37728 - DNA, 20 bp, Staphylococcus felis
cactctaggctgactgccgg

SEQ ID NO: 37729 - DNA, 20 bp, Ralstonia paucula
ggctaatacctggggtagat

SEQ ID NO: 37730 - DNA, 20 bp, Acinetobacter haemolyticus
ggaagtgtagcttgctacat

SEQ ID NO: 37731 - DNA, 20 bp, Tissierella praeacuta
acatgcccctgaccgtccta

SEQ ID NO: 37732 - DNA, 20 bp, Clostridium ramosum
tcagtaagccatagaaacca

SEQ ID NO: 37733 - DNA, 20 bp, Actinomyces turicensis
tcaagccgcagctttgggtt

SEQ ID NO: 37734 - DNA, 20 bp, Aerococcus viridans
aatatcttcttccgcatgga

SEQ ID NO: 37735 - DNA, 20 bp, Methylobacterium mesophilicum
aaggcttgctgccggaggat

SEQ ID NO: 37736 - DNA, 20 bp, Oligella urethralis
ggtcttacgatccccctctt

SEQ ID NO: 37737 - DNA, 20 bp, Prevotella bivia
ctgttagcacctagtgttag

SEQ ID NO: 37738 - DNA, 20 bp, Eikenella corrodens
gcaggtagggtaaccgcaag

SEQ ID NO: 37739 - DNA, 20 bp, Peptostreptococcus anaerobius
tcgtcgaaggtggcgtcgat

SEQ ID NO: 37740 - DNA, 20 bp, Bacteroides ureolyticus
gatgctaaaatagctacctt

SEQ ID NO: 37741 - DNA, 20 bp, Streptococcus parauberis
actggtgcttgcactagtca

SEQ ID NO: 37742 - DNA, 20 bp, Granulicatella adiacens
tagcgccttgacggtatcta

SEQ ID NO: 37743 - DNA, 20 bp, Dermabacter hominis
atgaagctgtgcttgcacag

SEQ ID NO: 37744 - DNA, 20 bp, Corynebacterium falsenii
cttgacatatgcaggatcgc

SEQ ID NO: 37745 - DNA, 20 bp, Delftia acidovorans
tacgagaggcccatgacggt

SEQ ID NO: 37746 - DNA, 20 bp, Alicyclobacillus acidocaldarius
ggtaccgtctcgcatggggc

SEQ ID NO: 37747 - DNA, 20 bp, Rothia mucilaginosa
ggaagaagagagattgacgg

SEQ ID NO: 37748 - DNA, 20 bp, Alicyclobacillus acidocaldarius
ccccgcctcaacgcgctggt

SEQ ID NO: 37749 - DNA, 20 bp, Corynebacterium macginleyi
ggtggcctaaacgtgttagg

SEQ ID NO: 37750 - DNA, 20 bp, Bacteroides stercoris
ttattaaagaatttcggttg

SEQ ID NO: 37751 - DNA, 20 bp, Gemella haemolysans
tgtgtagtaactatacacag

SEQ ID NO: 37752 - DNA, 20 bp, Clostridium septicum
aggtatcaactccttccgtg

SEQ ID NO: 37753 - DNA, 20 bp, Acinetobacter genospecies 3
tcgagcggagagaggtagct

SEQ ID NO: 37754 - DNA, 20 bp, Pediococcus dextrinicus
ctctaaaagctagtctcagt

SEQ ID NO: 37755 - DNA, 20 bp, Alcaligenes faecalis
gagcttgctctcttggcggc

SEQ ID NO: 37756 - DNA, 20 bp, Peptoniphilus indolicus
cgatagcaagcgaatctcaa

SEQ ID NO: 37757 - DNA, 20 bp, Pediococcus pentosaceus
acgaacttccgttaattgat

SEQ ID NO: 37758 - DNA, 20 bp, Dietzia maris
cagcatgcatgtgttgtggt

SEQ ID NO: 37759 - DNA, 20 bp, Campylobacter curvus
aatttgacggtacccaagga

SEQ ID NO: 37760 - DNA, 20 bp, Anaerococcus prevotii
tagaggtaagtggaattttt

SEQ ID NO: 37761 - DNA, 20 bp, Bacteroides stercoris
tgtggctttttgtatgtacc

SEQ ID NO: 37762 - DNA, 20 bp, Myroides odoratus
cggttttcggactgagtggc

SEQ ID NO: 37763 - DNA, 20 bp, Acinetobacter johnsonii
gaaaggtagcttgctaccta

SEQ ID NO: 37764 - DNA, 20 bp, Campylobacter curvus
tttcttggggaagaaatttg

SEQ ID NO: 37765 - DNA, 20 bp, Bacteroides thetaiotaomicron
tgcttgcaaactggagatgg

SEQ ID NO: 37766 - DNA, 20 bp, Streptococcus thermophilus
atttgaaaggggcaattgct

SEQ ID NO: 37767 - DNA, 20 bp, Acinetobacter johnsonii
gaaaggtagcttgctacctg

SEQ ID NO: 37768 - DNA, 20 bp, Burkholderia multivorans
ggaaagaaatccctggctct

SEQ ID NO: 37769 - DNA, 20 bp, Clostridium tetani
ctaggtgtaggagggtccaa

SEQ ID NO: 37770 - DNA, 20 bp, Bacillus schlegellii
aacaccgggaaaccgggcta

SEQ ID NO: 37771 - DNA, 20 bp, Prevotella melaninogenica
tagagataatgacgcccttc

SEQ ID NO: 37772 - DNA, 20 bp, Corynebacterium falsenii
cccttgcttgcaggggtact

SEQ ID NO: 37773 - DNA, 20 bp, Bacillus alcalophilus
ttgtaaaagatggctccggc

SEQ ID NO: 37774 - DNA, 20 bp, Brochothrix campestris
ggctgtcactgtgagatgga

SEQ ID NO: 37775 - DNA, 20 bp, Bacillus coagulans
ttcctccgcatggaggaaaa

SEQ ID NO: 37776 - DNA, 20 bp, Peptoniphilus indolicus
tggtcggaacaaagagcggg

SEQ ID NO: 37777 - DNA, 20 bp, Corynebacterium glucuronolyticum
cgtcagggacgaagtttttt

SEQ ID NO: 37778 - DNA, 20 bp, Lactococcus lactis
atcaagtgacggtaactacc

SEQ ID NO: 37779 - DNA, 20 bp, Bacteroides uniformis
aagccttcgatggatagggg

SEQ ID NO: 37780 - DNA, 20 bp, Cardiobacterium hominis
acttaggagggcgcttgcca

SEQ ID NO: 37781 - DNA, 20 bp, Aerococcus christensenii
ctgctatcacttatcgatgg

SEQ ID NO: 37782 - DNA, 20 bp, Campylobacter lari
ccttttgttagggaagaacc

SEQ ID NO: 37783 - DNA, 20 bp, Lactococcus garvieae
cgcaaggagggcgcttccta

SEQ ID NO: 37784 - DNA, 20 bp, Clostridium ramosum
tgttataaaggaagaacggc

SEQ ID NO: 37785 - DNA, 20 bp, Bacillus laevolacticus
gcaagtcgagcggacctatc

SEQ ID NO: 37786 - DNA, 20 bp, Clostridium cadaveris
aaaggagccagcggcctaag

SEQ ID NO: 37787 - DNA, 20 bp, Campylobacter lari
ttgagtagggaaagtttttc

SEQ ID NO: 37788 - DNA, 20 bp, Paenibacillus pabuli
caaccccggatcgcactgga

SEQ ID NO: 37789 - DNA, 20 bp, Bacteroides forsythus
gtgtaagctctacagcgaaa

SEQ ID NO: 37790 - DNA, 20 bp, Corynebacterium coyleae
gtcgtttgtgtaagcccgca

SEQ ID NO: 37791 - DNA, 20 bp, Bacillus sp
cttcgggggtgacgcatgtg

SEQ ID NO: 37792 - DNA, 20 bp, Moraxella osloensis
aagcagggaggagaggctaa

SEQ ID NO: 37793 - DNA, 20 bp, Peptostreptococcus anaerobius
cctgtgaggaagccccggct

SEQ ID NO: 37794 - DNA, 20 bp, Streptococcus hyovaginalis
ctgttataagcgaagaacgg

SEQ ID NO: 37795 - DNA, 20 bp, Cardiobacterium hominis
gctttctgggtcgatactga

SEQ ID NO: 37796 - DNA, 20 bp, Streptococcus constellatus
ataccgtataagaacattta

SEQ ID NO: 37797 - DNA, 20 bp, Veillonella atypica
aacccgagaaacactctctc

SEQ ID NO: 37798 - DNA, 20 bp, Clostridium paraputrificum
ggtgatctaacccgtaaggg

SEQ ID NO: 37799 - DNA, 20 bp, Tetragenococcus halophilus
ctatgacggtagctgaccag

SEQ ID NO: 37800 - DNA, 20 bp, Alicyclobacillus acidocaldarius
cgcctcaacgcgctggtaac

SEQ ID NO: 37801 - DNA, 20 bp, Paenibacillus amylolyticus
gagataatgaaagacggagc

SEQ ID NO: 37802 - DNA, 20 bp, Dermacoccus nishinomiyaensis
tggaaagtttttgtggtggg

SEQ ID NO: 37803 - DNA, 20 bp, Gemella haemolysans
taagtgttggtctcataaga

SEQ ID NO: 37804 - DNA, 20 bp, Tissierella praeacuta
tcgcatgagatttaagtcaa

SEQ ID NO: 37805 - DNA, 20 bp, Eggerthella lenta
cgcgatgggtagccgggttg

SEQ ID NO: 37806 - DNA, 20 bp, Paenibacillus pabuli
gagatggagccaatcccaac

SEQ ID NO: 37807 - DNA, 20 bp, Alcaligenes faecalis
agaagaaaaggtacctccta

SEQ ID NO: 37808 - DNA, 20 bp, Corynebacterium auris
tgggcgctaggtgtgagcct

SEQ ID NO: 37809 - DNA, 20 bp, Clostridium limosum
gtgcccttcggggaacttgg

SEQ ID NO: 37810 - DNA, 20 bp, Campylobacter curvus
tcatctagagatagaagagt

SEQ ID NO: 37811 - DNA, 20 bp, Propionibacterium avidum
acatggactgggagtgctca

SEQ ID NO: 37812 - DNA, 20 bp, Paenibacillus amylolyticus
ccaaggctcaaccttggttc

SEQ ID NO: 37813 - DNA, 20 bp, Vibrio cholerae
tccccctctaccgggcaatt

SEQ ID NO: 37814 - DNA, 20 bp, Fusobacterium varium
agaagtcagtgacggtacca

SEQ ID NO: 37815 - DNA, 20 bp, Paenibacillus validus
cggagagtaactgctctgag

SEQ ID NO: 37816 - DNA, 20 bp, Abiotrophia defectiva
ttgttagagaagaacagcgc

SEQ ID NO: 37817 - DNA, 20 bp, Photobacterium damselae
ttatttgacgttacctacag

SEQ ID NO: 37818 - DNA, 20 bp, Bacteroides fragilis
agcgggtgaccgtatgctaa

SEQ ID NO: 37819 - DNA, 20 bp, Dolosigranulum pigrum
agcagcgatcccgcaagggc

SEQ ID NO: 37820 - DNA, 20 bp, Anaerococcus tetradius
actgctcatcttgaggtatg

SEQ ID NO: 37821 - DNA, 20 bp, Myroides odoratus
ggttttcggactgagtggct

SEQ ID NO: 37822 - DNA, 20 bp, Tissierella praeacuta
aacgagcagctacttagcga

SEQ ID NO: 37823 - DNA, 20 bp, Streptococcus anginosus
cagtatgtaacacatgttag

SEQ ID NO: 37824 - DNA, 20 bp, Paenibacillus validus
gcactgaaaactgggagact

SEQ ID NO: 37825 - DNA, 20 bp, Acinetobacter genospecies 3
aaagagggcggttaccacgg

SEQ ID NO: 37826 - DNA, 20 bp, Clostridium clostridiiforme
ccgcaaacgcagtaagcatt

SEQ ID NO: 37827 - DNA, 20 bp, Chromobacterium violaceum
taccgtgtaatgggggatag

SEQ ID NO: 37828 - DNA, 20 bp, Prevotella melaninogenica
attgtttgcaggtaccatac

SEQ ID NO: 37829 - DNA, 20 bp, Anaerococcus tetradius
aaaatgacagtaccatacga

SEQ ID NO: 37830 - DNA, 20 bp, Bacteroides forsythus
aaagtttgtcgcttaacgat

SEQ ID NO: 37831 - DNA, 20 bp, Chromobacterium violaceum
tgtacggaacttgccagaga

SEQ ID NO: 37832 - DNA, 20 bp, Pseudoramibacter alactolyticus
atattatggttttgtcgcat

SEQ ID NO: 37833 - DNA, 20 bp, Prevotella intermedia
gcctggcgttagcggctaag

SEQ ID NO: 37834 - DNA, 20 bp, Campylobacter lari
tctatactcctgcttaacac

SEQ ID NO: 37835 - DNA, 20 bp, Fusobacterium nucleatum
tatgattttaaggcatctta

SEQ ID NO: 37836 - DNA, 20 bp, Facklamia ignava
ccgagaagggaacttgttcc

SEQ ID NO: 37837 - DNA, 20 bp, Prevotella bivia
caaatacgatctaatcctta

SEQ ID NO: 37838 - DNA, 20 bp, Corynebacterium propinquum
gtaaacaaggtagccgtacc

SEQ ID NO: 37839 - DNA, 20 bp, Leptotrichia buccalis
catgaagagtgtccgtgccg

SEQ ID NO: 37840 - DNA, 20 bp, Alicyclobacillus acidocaldarius
gtttccttcggcactggggt

SEQ ID NO: 37841 - DNA, 20 bp, Anaerococcus prevotii
gagtgctaggtatcggaata

SEQ ID NO: 37842 - DNA, 20 bp, Morganella morganii
gcctcgcaccatcagatgaa

SEQ ID NO: 37843 - DNA, 20 bp, Moraxella atlantae
cactttaagcagggaggaag

SEQ ID NO: 37844 - DNA, 20 bp, Streptococcus equi
ttaaccatttaaaaggagca

SEQ ID NO: 37845 - DNA, 20 bp, Peptostreptococcus anaerobius
acacccgaagccgattatcc

SEQ ID NO: 37846 - DNA, 20 bp, Tissierella praeacuta
ttctggacttatactgacgc

SEQ ID NO: 37847 - DNA, 20 bp, Propionibacterium freudenreichii
atatgagcctggcctgcatg

SEQ ID NO: 37848 - DNA, 20 bp, Paenibacillus popilliae
gaacgccttgtagagtaact

SEQ ID NO: 37849 - DNA, 20 bp, Alloiococcus otitis
cacaatgggtgcaagcctga

SEQ ID NO: 37850 - DNA, 20 bp, Fusobacterium varium
cagagagctgcaaacctgcg

SEQ ID NO: 37851 - DNA, 20 bp, Moraxella  catarrhalis
cttctgatacttagtggcgg

SEQ ID NO: 37852 - DNA, 20 bp, Corynebacterium accolens
cttgcttctctggatgagtt

SEQ ID NO: 37853 - DNA, 20 bp, Arcanobacterium bernardiae
gtttgttgcgcctgctgtga

SEQ ID NO: 37854 - DNA, 20 bp, Bacillus schlegellii
cggcctgttaagtctgctgt

SEQ ID NO: 37855 - DNA, 20 bp, Bacteroides thetaiotaomicron
ctcatactcggggatagcct

SEQ ID NO: 37856 - DNA, 20 bp, Veillonella atypica
actgaaggaggggattgcgt

SEQ ID NO: 37857 - DNA, 20 bp, Sporosarcina pasteurii
ctataccggtcagcgggatg

SEQ ID NO: 37858 - DNA, 20 bp, Facklamia sourekii
gcgttaacgcaataaacact

SEQ ID NO: 37859 - DNA, 20 bp, Tissierella praeacuta
atgaaactttaattatctta

SEQ ID NO: 37860 - DNA, 20 bp, Campylobacter concisus
tggatgccattgtggaaagt

SEQ ID NO: 37861 - DNA, 20 bp, Salmonella enteritidis
aagaatccagagatggattt

SEQ ID NO: 37862 - DNA, 20 bp, Leptotrichia buccalis
ccgatgatgaagatagttca

SEQ ID NO: 37863 - DNA, 20 bp, Clostridium clostridiiforme
cacagggccgcatggtctgg

SEQ ID NO: 37864 - DNA, 20 bp, Sporosarcina pasteurii
cccgctgaccggtatagaga

SEQ ID NO: 37865 - DNA, 20 bp, Clostridium innocuum
tgggagtcagtaatacccga

SEQ ID NO: 37866 - DNA, 20 bp, Propionibacterium avidum
aatccttgctgcatggtggg

SEQ ID NO: 37867 - DNA, 20 bp, Aerococcus christensenii
gccttgcggtgcattaacta

SEQ ID NO: 37868 - DNA, 20 bp, Micromonas micros
aaggttttcgaatcgtaaag

SEQ ID NO: 37869 - DNA, 20 bp, Eggerthella lenta
tctctaatccgagggctcaa

SEQ ID NO: 37870 - DNA, 20 bp, Actinomyces bovis
cggtggcctaacctagttta

SEQ ID NO: 37871 - DNA, 20 bp, Moellerella wisconsensis
ctgtcggatgaacccatatg

SEQ ID NO: 37872 - DNA, 20 bp, Campylobacter curvus
ttgctgagctagtcttggca

SEQ ID NO: 37873 - DNA, 20 bp, Acinetobacter johnsonii
gcgaggaggaggctacttgg

SEQ ID NO: 37874 - DNA, 20 bp, Weissella paramesenteroides
tataataccaacaaccgcat

SEQ ID NO: 37875 - DNA, 20 bp, Chromobacterium violaceum
ctagctgttgggggtttgaa

SEQ ID NO: 37876 - DNA, 20 bp, Lactobacillus acidophilus
tttgaccacctaagagatta

SEQ ID NO: 37877 - DNA, 20 bp, Lactococcus lactis
gttggtagagaagaacgttg

SEQ ID NO: 37878 - DNA, 20 bp, Bacteroides merdae
gtttgtggctcaaccataaa

SEQ ID NO: 37879 - DNA, 20 bp, Streptococcus constellatus
gtttactacaccgtattctg

SEQ ID NO: 37880 - DNA, 20 bp, Serratia proteamaculans
gaggaggaagggtagtgtgt

SEQ ID NO: 37881 - DNA, 20 bp, Streptococcus constellatus
aggatgcaccgtagtttact

SEQ ID NO: 37882 - DNA, 20 bp, Clostridium subterminale
aatggttggtacaataagat

SEQ ID NO: 37883 - DNA, 20 bp, Anaerobiospirillum succiniciproducens
aaagctgggaactcaaagga

SEQ ID NO: 37884 - DNA, 20 bp, Streptococcus dysgalactiae
gtgcttgcaccggttcaagg

SEQ ID NO: 37885 - DNA, 20 bp, Streptococcus suis
tagacggatgagttgcgaac

SEQ ID NO: 37886 - DNA, 20 bp, Helcococcus kunzii
ctgaacaaagcgcagctacc

SEQ ID NO: 37887 - DNA, 20 bp, Moraxella  catarrhalis
ccagtcgttgggtcttttaa

SEQ ID NO: 37888 - DNA, 20 bp, Actinomyces odontolyticus
cggcggcactgcagagatgt

SEQ ID NO: 37889 - DNA, 20 bp, Streptococcus thermophilus
ttggatcctttccgggattc

SEQ ID NO: 37890 - DNA, 20 bp, Facklamia ignava
ctgtagagtaactgttatag

SEQ ID NO: 37891 - DNA, 20 bp, Streptococcus constellatus
taccgtataagaacatttac

SEQ ID NO: 37892 - DNA, 20 bp, Clostridium ramosum
cctagacagggggataacta

SEQ ID NO: 37893 - DNA, 20 bp, Haemophilus actinemycetemcomitans
tggggatgtactgacgctga

SEQ ID NO: 37894 - DNA, 20 bp, Streptococcus agalactiae
atgttagttatttaaaagga

SEQ ID NO: 37895 - DNA, 20 bp, Acinetobacter junii
ccttatcttagcggcggacg

SEQ ID NO: 37896 - DNA, 20 bp, Bacteroides merdae
gtatgtaccctatgaataag

SEQ ID NO: 37897 - DNA, 20 bp, Peptoniphilus indolicus
tgaattagcggtcaaagatg

SEQ ID NO: 37898 - DNA, 20 bp, Propionibacterium acnes
gctttcgcctgtgacgaagc

SEQ ID NO: 37899 - DNA, 20 bp, Atopobium parvulum
agtcgaacgattaaagcacc

SEQ ID NO: 37900 - DNA, 20 bp, Brevibacillus reuszeri
gtatgccaatctcttaaaac

SEQ ID NO: 37901 - DNA, 20 bp, Corynebacterium glucuronolyticum
aggaccgcatcgtggttggt

SEQ ID NO: 37902 - DNA, 20 bp, Bacillus sp
tgaagagcttgcttttgatc

SEQ ID NO: 37903 - DNA, 20 bp, Bacteroides fragilis
tactgttttgtatgtattat

SEQ ID NO: 37904 - DNA, 20 bp, Facklamia sourekii
acttgtttctcttgacgtga

SEQ ID NO: 37905 - DNA, 20 bp, Corynebacterium glucuronolyticum
gcgtcgtctgtgtaatccag

SEQ ID NO: 37906 - DNA, 20 bp, Weeksella virosa
tagttttgaaagatttatcg

SEQ ID NO: 37907 - DNA, 20 bp, Actinomyces bovis
ccgtgatgccatagaaactg

SEQ ID NO: 37908 - DNA, 20 bp, Oligella urethralis
cctcaactaccgtcagcatc

SEQ ID NO: 37909 - DNA, 20 bp, Porphyromonas endodontalis
gttgaaactgatatgctaga

SEQ ID NO: 37910 - DNA, 20 bp, Clostridium ramosum
aacttcagtaagccatagaa

SEQ ID NO: 37911 - DNA, 20 bp, Paenibacillus peoriae
gcggggttgtttagaagctt

SEQ ID NO: 37912 - DNA, 20 bp, Facklamia ignava
gaagggaacttgttcctttc

SEQ ID NO: 37913 - DNA, 20 bp, Propionibacterium freudenreichii
cccttgacttcggtatagct

SEQ ID NO: 37914 - DNA, 20 bp, Streptococcus infantarius
cgcataacagcatttaaccc

SEQ ID NO: 37915 - DNA, 20 bp, Corynebacterium ulcerans
tatacaagatcggcgtagag

SEQ ID NO: 37916 - DNA, 20 bp, Bacillus alcalophilus
gatgtgaaatatcggggctc

SEQ ID NO: 37917 - DNA, 20 bp, Bacillus schlegellii
cctgttaagtctgctgtgaa

SEQ ID NO: 37918 - DNA, 20 bp, Veillonella atypica
agcgatggaagcttgcttct

SEQ ID NO: 37919 - DNA, 20 bp, Campylobacter rectus
agttgttgcttcgctagtcg

SEQ ID NO: 37920 - DNA, 20 bp, Propionibacterium freudenreichii
tcggacggtaaggccccttt

SEQ ID NO: 37921 - DNA, 20 bp, Fusobacterium necrogenes
attatgtgagtttcgcatgg

SEQ ID NO: 37922 - DNA, 20 bp, Acinetobacter baumannii
tcgagcgggggaaggtagct

SEQ ID NO: 37923 - DNA, 20 bp, Streptococcus gordonii
agtttataccgtagcttgct

SEQ ID NO: 37924 - DNA, 20 bp, Weeksella virosa
tagttgccagcgtttaaaga

SEQ ID NO: 37925 - DNA, 20 bp, Helcococcus ovis
cttagatatcgcatgataat

SEQ ID NO: 37926 - DNA, 20 bp, Vibrio cholerae
aacgtcaaatgattaaggta

SEQ ID NO: 37927 - DNA, 20 bp, Corynebacterium glucuronolyticum
aatcgcgaaagccagtctca

SEQ ID NO: 37928 - DNA, 20 bp, Prevotella bivia
atgcccgctgttagcaccta

SEQ ID NO: 37929 - DNA, 20 bp, Leuconostoc mesenteroides
cagacggtttattaagtctg

SEQ ID NO: 37930 - DNA, 20 bp, Leptotrichia buccalis
tttggctagagtgctggaga

SEQ ID NO: 37931 - DNA, 20 bp, Gemella morbillorum
ggatatgtagtaactataca

SEQ ID NO: 37932 - DNA, 20 bp, Paenibacillus apiarius
aactgcatgacttgagtaca

SEQ ID NO: 37933 - DNA, 20 bp, Alcaligenes faecalis
tggccgtgctcgcaagagaa

SEQ ID NO: 37934 - DNA, 20 bp, Haemophilus paraphrophilus
gcgcaacaaattgacgttaa

SEQ ID NO: 37935 - DNA, 20 bp, Proteus vulgaris
gaaggtgataaagttaatac

SEQ ID NO: 37936 - DNA, 20 bp, Leuconostoc argentinum
actgttgtatgggaagaaat

SEQ ID NO: 37937 - DNA, 20 bp, Propionibacterium freudenreichii
ttggaaagctttatgcggtc

SEQ ID NO: 37938 - DNA, 20 bp, Bacteroides ovatus
ttgcagttgaaactggcagt

SEQ ID NO: 37939 - DNA, 20 bp, Weeksella virosa
tgggttagcgcctgatccag

SEQ ID NO: 37940 - DNA, 20 bp, Clostridium paraputrificum
gtgggaagtcccttcgggga

SEQ ID NO: 37941 - DNA, 20 bp, Staphylococcus sciuri
gaatccgcgaggccaagcaa

SEQ ID NO: 37942 - DNA, 20 bp, Clostridium cadaveris
aggtgtaggggtttcgatac

SEQ ID NO: 37943 - DNA, 20 bp, Porphyromonas endodontalis
gtaagagtctaagcgaaagc

SEQ ID NO: 37944 - DNA, 20 bp, Veillonella parvula
atctaacctcggcatcgagg

SEQ ID NO: 37945 - DNA, 20 bp, Alcaligenes faecalis
ttgctctcttggcggcgagt

SEQ ID NO: 37946 - DNA, 20 bp, Enterococcus raffinosus
gtgaaagatggccttgctat

SEQ ID NO: 37947 - DNA, 20 bp, Prevotella melaninogenica
ctgttggtacctggtatcag

SEQ ID NO: 37948 - DNA, 20 bp, Gemella bergeri
ctaagtgttggtctcaaaag

SEQ ID NO: 37949 - DNA, 20 bp, Aerococcus christensenii
aacgggcagcgagctcgcga

SEQ ID NO: 37950 - DNA, 20 bp, Corynebacterium propinquum
cgtctgtgaaattccacagc

SEQ ID NO: 37951 - DNA, 20 bp, Proteus vulgaris
cttgaactgtggcttctgga

SEQ ID NO: 37952 - DNA, 20 bp, Weissella paramesenteroides
accgtataataccaacaacc

SEQ ID NO: 37953 - DNA, 20 bp, Gemella bergeri
tctcaaaagagatcagtgct

SEQ ID NO: 37954 - DNA, 20 bp, Streptococcus suis
tttctcacttgacggtatct

SEQ ID NO: 37955 - DNA, 20 bp, Bacillus pumilus
aggatgaaagacggtttcgg

SEQ ID NO: 37956 - DNA, 20 bp, Actinomyces bovis
caaaagcacagagatgtgta

SEQ ID NO: 37957 - DNA, 20 bp, Pseudoramibacter alactolyticus
aaggttttgaatgatccttc

SEQ ID NO: 37958 - DNA, 20 bp, Proteus vulgaris
ggtcttgaactgtggcttct

SEQ ID NO: 37959 - DNA, 20 bp, Anaerobiospirillum succiniciproducens
acagagggaaacgataccgg

SEQ ID NO: 37960 - DNA, 20 bp, Virgibacillus pantothenticus
atatgctgtcacttacagat

SEQ ID NO: 37961 - DNA, 20 bp, Lactococcus lactis
agtggaaagctcatcaagtg

SEQ ID NO: 37962 - DNA, 20 bp, Corynebacterium coyleae
tgtaaagccggtcgtagttc

SEQ ID NO: 37963 - DNA, 20 bp, Leptotrichia buccalis
ggacggaactgcacgagtag

SEQ ID NO: 37964 - DNA, 20 bp, Anaerobiospirillum succiniciproducens
acagagggaaacgataccgt

SEQ ID NO: 37965 - DNA, 20 bp, Bacillus sp
tgcttttgatcagttagcgg

SEQ ID NO: 37966 - DNA, 20 bp, Prevotella intermedia
aacggcattatgtgcttgca

SEQ ID NO: 37967 - DNA, 20 bp, Paenibacillus thiaminolyticus
ttgccagggaagaacgctat

SEQ ID NO: 37968 - DNA, 20 bp, Bacillus pallidus
cttttagctgtcactgcagg

SEQ ID NO: 37969 - DNA, 20 bp, Rothia mucilaginosa
attgacggtacctgcagaga

SEQ ID NO: 37970 - DNA, 20 bp, Granulicatella adiacens
tgcactggtcaatctagtgg

SEQ ID NO: 37971 - DNA, 20 bp, Helcococcus ovis
aagttgaacgagaatttttt

SEQ ID NO: 37972 - DNA, 20 bp, Aerococcus christensenii
tatcgatggccttgcggtgc

SEQ ID NO: 37973 - DNA, 20 bp, Brevibacillus agri
aaaagaaaagatggcttttc

SEQ ID NO: 37974 - DNA, 20 bp, Campylobacter lari
gccctacacaagaggacaac

SEQ ID NO: 37975 - DNA, 20 bp, Veillonella parvula
gatctaacctcggcatcgag

SEQ ID NO: 37976 - DNA, 20 bp, Tissierella praeacuta
taataccttatgacacttaa

SEQ ID NO: 37977 - DNA, 20 bp, Delftia acidovorans
aagcttctcctaatacgaga

SEQ ID NO: 37978 - DNA, 20 bp, Comamonas testosteroni
tccccgggtcatgacggtac

SEQ ID NO: 37979 - DNA, 20 bp, Propionibacterium avidum
acacccgcccgtcaagtcat

SEQ ID NO: 37980 - DNA, 20 bp, Bacteroides capilosus
  misc_feature (6)..(6): n is a, c, g, or t
gtactngatgaataagccac

SEQ ID NO: 37981 - DNA, 20 bp, Moraxella osloensis
ccattagattagacgttacc

SEQ ID NO: 37982 - DNA, 20 bp, Actinomyces neuii
tcttaaagggcatcttggtt

SEQ ID NO: 37983 - DNA, 20 bp, Pasteurella multocida
tgttgttaaatagatagcat

SEQ ID NO: 37984 - DNA, 20 bp, Bacillus coagulans
aactgcccggtggaggggga

SEQ ID NO: 37985 - DNA, 20 bp, Acinetobacter lwoffii
accgagattaatactcttgg

SEQ ID NO: 37986 - DNA, 20 bp, Eggerthella lenta
ctaatccgagggctcaaccc

SEQ ID NO: 37987 - DNA, 20 bp, Clostridium tertium
gaggaagtcctttcggggac

SEQ ID NO: 37988 - DNA, 20 bp, Bacteroides merdae
cccgcatgggaatatttgtt

SEQ ID NO: 37989 - DNA, 20 bp, Moraxella atlantae
ttgacatagtgagaatccta

SEQ ID NO: 37990 - DNA, 20 bp, Gemella morbillorum
cgcgagagtcagccaacctc

SEQ ID NO: 37991 - DNA, 20 bp, Weissella paramesenteroides
ataccgtataataccaacaa

SEQ ID NO: 37992 - DNA, 20 bp, Peptostreptococcus anaerobius
acggcatcgtagatatatca

SEQ ID NO: 37993 - DNA, 20 bp, Alicyclobacillus acidocaldarius
aaccatgcaccacctgtctc

SEQ ID NO: 37994 - DNA, 20 bp, Gemella haemolysans
tgtgttgttctgacctttgg

SEQ ID NO: 37995 - DNA, 20 bp, Anaerococcus prevotii
tattaaaaagaataccggtg

SEQ ID NO: 37996 - DNA, 20 bp, Corynebacterium amycolatum
gtaagaaactgccggggtta

SEQ ID NO: 37997 - DNA, 20 bp, Bacillus pumilus
ttcaaggatgaaagacggtt

SEQ ID NO: 37998 - DNA, 20 bp, Propionibacterium freudenreichii
ggcttaactctgggcttgct

SEQ ID NO: 37999 - DNA, 20 bp, Eggerthella lenta
gctccgccctccgtgccgca

SEQ ID NO: 38000 - DNA, 20 bp, Corynebacterium glucuronolyticum
cttttggttggcaggcgata

SEQ ID NO: 38001 - DNA, 20 bp, Eggerthella lenta
agggctcaacccccggccgg

SEQ ID NO: 38002 - DNA, 20 bp, Alicyclobacillus acidocaldarius
ccccgcaagaagatgcctcc

SEQ ID NO: 38003 - DNA, 20 bp, Fusobacterium nucleatum
ttttaaggcatcttagaatt

SEQ ID NO: 38004 - DNA, 20 bp, Brevibacillus choshinensis
gactccaatcctcagtgccg

SEQ ID NO: 38005 - DNA, 20 bp, Gemella haemolysans
ttagggaagaatgattgtgt

SEQ ID NO: 38006 - DNA, 20 bp, Eggerthella lenta
ctctaatccgagggctcaac

SEQ ID NO: 38007 - DNA, 20 bp, Corynebacterium coyleae
gtctgcgagcctgtgagggt

SEQ ID NO: 38008 - DNA, 20 bp, Nocardia asteroides
cttgacatactaagaacttt

SEQ ID NO: 38009 - DNA, 20 bp, Streptococcus porcinus
cttctgaccggcctagagat

SEQ ID NO: 38010 - DNA, 20 bp, Atopobium parvulum
caccacccgagtcgattgca

SEQ ID NO: 38011 - DNA, 20 bp, Actinomyces naeslundii
ggagacggggtttcctcctt

SEQ ID NO: 38012 - DNA, 20 bp, Lactococcus lactis
ccgcataacaactttaaaca

SEQ ID NO: 38013 - DNA, 20 bp, Nocardia asteroides
cgggggaggttgcttcggta

SEQ ID NO: 38014 - DNA, 20 bp, Streptococcus agalactiae
aattaacacatgttagttat

SEQ ID NO: 38015 - DNA, 20 bp, Kingella kingae
agtagatagggtaaccgcaa

SEQ ID NO: 38016 - DNA, 20 bp, Prevotella oris
aggcagcttgcgggagcaca

SEQ ID NO: 38017 - DNA, 20 bp, Corynebacterium group F
atcgcacaaagccggcctta

SEQ ID NO: 38018 - DNA, 20 bp, Chromobacterium violaceum
gcaggcggttgtgcaagtct

SEQ ID NO: 38019 - DNA, 20 bp, Lactococcus garvieae
tctgatgtaaaaggcagtgg

SEQ ID NO: 38020 - DNA, 20 bp, Fusobacterium mortiferum
aaattagcagagatgctttt

SEQ ID NO: 38021 - DNA, 20 bp, Streptococcus parauberis
atgtactaaatttaaaagga

SEQ ID NO: 38022 - DNA, 20 bp, Granulicatella elegans
agcgagcgcaggcggtcaat

SEQ ID NO: 38023 - DNA, 20 bp, Bacillus alcalophilus
aataccggataatcaaagga

SEQ ID NO: 38024 - DNA, 20 bp, Streptococcus parauberis
catgtactaaatttaaaagg

SEQ ID NO: 38025 - DNA, 20 bp, Serratia marcescens
ggtgagcttaatacgttcat

SEQ ID NO: 38026 - DNA, 20 bp, Leuconostoc pseudomesenteroides
ggcgctttggcgtcacctag

SEQ ID NO: 38027 - DNA, 20 bp, Aerococcus christensenii
agcgggggacaacatccgga

SEQ ID NO: 38028 - DNA, 20 bp, Facklamia ignava
gtcactgaaggatggtcccg

SEQ ID NO: 38029 - DNA, 20 bp, Staphylococcus aureus
gaagcaagcttctcgtccgt

SEQ ID NO: 38030 - DNA, 20 bp, Listeria monocytogenes
ggcgcatgccacgcttttga

SEQ ID NO: 38031 - DNA, 20 bp, Peptostreptococcus anaerobius
ctccgaaactggaagacttg

SEQ ID NO: 38032 - DNA, 20 bp, Propionibacterium freudenreichii
cagagatgggcgtgcctttt

SEQ ID NO: 38033 - DNA, 20 bp, Aeromonas hydrophila
ttgatgcctaatacgtatca

SEQ ID NO: 38034 - DNA, 20 bp, Campylobacter lari
ttagttgctaacacttcggg

SEQ ID NO: 38035 - DNA, 20 bp, Helcococcus kunzii
aatttcggtgaaagatggtc

SEQ ID NO: 38036 - DNA, 20 bp, Gemella morbillorum
agagtcagccaacctcataa

SEQ ID NO: 38037 - DNA, 20 bp, Acinetobacter junii
tgcttgcaccttatcttagc

SEQ ID NO: 38038 - DNA, 20 bp, Alicyclobacillus acidocaldarius
gccgctctccccgagcaaca

SEQ ID NO: 38039 - DNA, 20 bp, Propionibacterium freudenreichii
caggaaactggtggtaatcc

SEQ ID NO: 38040 - DNA, 20 bp, Prevotella corporis
ggtcggcctagggcaaaacc

SEQ ID NO: 38041 - DNA, 20 bp, Corynebacterium coyleae
atacaccagatcgccgtaga

SEQ ID NO: 38042 - DNA, 20 bp, Delftia acidovorans
acggaacgaaaaagcttctc

SEQ ID NO: 38043 - DNA, 20 bp, Tissierella praeacuta
aaaagatggtctcgcgtccc

SEQ ID NO: 38044 - DNA, 20 bp, Listeria monocytogenes
taccgaatgataaagtgtgg

SEQ ID NO: 38045 - DNA, 20 bp, Gemella bergeri
gtgtagtaactatacacaaa

SEQ ID NO: 38046 - DNA, 20 bp, Fusobacterium mortiferum
cagtctgggacaacatttgg

SEQ ID NO: 38047 - DNA, 20 bp, Morganella morganii
ccttggcaattgacgttacc

SEQ ID NO: 38048 - DNA, 20 bp, Campylobacter lari
aacacaagttgagtagggaa

SEQ ID NO: 38049 - DNA, 20 bp, Bacillus pumilus
aataccggatagttccttga

SEQ ID NO: 38050 - DNA, 20 bp, Alcaligenes faecalis
gcgcgagagagcttgctctc

SEQ ID NO: 38051 - DNA, 20 bp, Prevotella corporis
caaggcttcgatcggtaggg

SEQ ID NO: 38052 - DNA, 20 bp, Paenibacillus amylolyticus
tggggagataatgaaagacg

SEQ ID NO: 38053 - DNA, 20 bp, Helcococcus kunzii
gcaagttgaacgagaatttt

SEQ ID NO: 38054 - DNA, 20 bp, Leuconostoc pseudomesenteroides
ctagaatagggaatgatttt

SEQ ID NO: 38055 - DNA, 20 bp, Rothia mucilaginosa
agagattgacggtacctgca

SEQ ID NO: 38056 - DNA, 20 bp, Propionibacterium freudenreichii
tggaactctcggtggagcgg

SEQ ID NO: 38057 - DNA, 20 bp, Peptoniphilus indolicus
gtaattcggtgccgcagtta

SEQ ID NO: 38058 - DNA, 20 bp, Alcaligenes faecalis
ctgttggggccgttaggcct

SEQ ID NO: 38059 - DNA, 20 bp, Salmonella enteritidis
acagaagaatccagagatgg

SEQ ID NO: 38060 - DNA, 20 bp, Enterococcus raffinosus
tagaaaccgcatggtttcta

SEQ ID NO: 38061 - DNA, 20 bp, Facklamia ignava
gcgccgagaagggaacttgt

SEQ ID NO: 38062 - DNA, 20 bp, Prevotella melaninogenica
gaattgcagaggaaggattt

SEQ ID NO: 38063 - DNA, 20 bp, Kocuria kristinae
agagatggttcttccctttt

SEQ ID NO: 38064 - DNA, 20 bp, Actinomyces odontolyticus
gttggtcgtgtgcaggtggt

SEQ ID NO: 38065 - DNA, 20 bp, Lactococcus lactis
aactttaaacacaagtttta

SEQ ID NO: 38066 - DNA, 20 bp, Capnocytophaga gingivalis
aattaaaactgcggtggtga

SEQ ID NO: 38067 - DNA, 20 bp, Chryseobacterium meningosepticum
gcgataggatgcaaatctcg

SEQ ID NO: 38068 - DNA, 20 bp, Propionibacterium acnes
ccgttgtgggggagccgtcg

SEQ ID NO: 38069 - DNA, 20 bp, Actinomyces meyeri
tggtcttcgcatgggggttg

SEQ ID NO: 38070 - DNA, 20 bp, Streptococcus acidominimus
gtcctagagatagggcttct

SEQ ID NO: 38071 - DNA, 20 bp, Cardiobacterium hominis
gggcgactagagtatgaaag

SEQ ID NO: 38072 - DNA, 20 bp, Clostridium ramosum
tccctacgggaacgtgcggt

SEQ ID NO: 38073 - DNA, 20 bp, Peptostreptococcus anaerobius
atacacatggataacatact

SEQ ID NO: 38074 - DNA, 20 bp, Leptotrichia buccalis
atgccgatgatgaagatagt

SEQ ID NO: 38075 - DNA, 20 bp, Campylobacter rectus
caaatcatccagagatggaa

SEQ ID NO: 38076 - DNA, 20 bp, Tetragenococcus halophilus
agaggaaatgctttttctat

SEQ ID NO: 38077 - DNA, 20 bp, Actinomyces meyeri
tctttgggataacgcccgga

SEQ ID NO: 38078 - DNA, 20 bp, Oligella urethralis
gctgtcctgaccattgtatg

SEQ ID NO: 38079 - DNA, 20 bp, Bacteroides thetaiotaomicron
atgggcgcaggcctgaacca

SEQ ID NO: 38080 - DNA, 20 bp, Anaerococcus tetradius
cgactttctggccataaact

SEQ ID NO: 38081 - DNA, 20 bp, Bacteroides ureolyticus
catactcctatttaacataa

SEQ ID NO: 38082 - DNA, 20 bp, Prevotella oris
tatgcggggataaagtgagg

SEQ ID NO: 38083 - DNA, 20 bp, Prevotella loescheii
ggtaaacgatggatgctcgt

SEQ ID NO: 38084 - DNA, 20 bp, Leuconostoc lactis
ccgcatggtgtagggttgaa

SEQ ID NO: 38085 - DNA, 20 bp, Rhodococcus equi
atactggataggaccgcact

SEQ ID NO: 38086 - DNA, 20 bp, Prevotella melaninogenica
ttgcagcgcatactggtttc

SEQ ID NO: 38087 - DNA, 20 bp, Arcanobacterium bernardiae
taaactcctttcagtacaga

SEQ ID NO: 38088 - DNA, 20 bp, Bacteroides merdae
aaagtttgtggctcaaccat

SEQ ID NO: 38089 - DNA, 20 bp, Listeria seeligeri
gctaataccgaatgataagg

SEQ ID NO: 38090 - DNA, 20 bp, Brochothrix campestris
cggtttggtaaccttcggga

SEQ ID NO: 38091 - DNA, 20 bp, Bacillus sp
tctctccgcatggagagaga

SEQ ID NO: 38092 - DNA, 20 bp, Pasteurella aerogenes
ctttgttgccagcacattat

SEQ ID NO: 38093 - DNA, 20 bp, Facklamia ignava
acttgttcctttcaacgcga

SEQ ID NO: 38094 - DNA, 20 bp, Moraxella  catarrhalis
gtcgttgggtcttttaaaga

SEQ ID NO: 38095 - DNA, 20 bp, Acinetobacter calcoaceticus
agtgatggtgcttgcactat

SEQ ID NO: 38096 - DNA, 20 bp, Bacillus lentus
aatctatccggtattagcac

SEQ ID NO: 38097 - DNA, 20 bp, Paenibacillus pabuli
aacgggctgtgaagccgcga

SEQ ID NO: 38098 - DNA, 20 bp, Campylobacter rectus
gtaggatgaggctatatcgt

SEQ ID NO: 38099 - DNA, 20 bp, Alicyclobacillus acidocaldarius
cctccctttgttccgcccat

SEQ ID NO: 38100 - DNA, 20 bp, Haemophilus haemolyticus
acgaaagtgcgggaccgcaa

SEQ ID NO: 38101 - DNA, 20 bp, Bacillus alcalophilus
atcactacgggatgggcccg

SEQ ID NO: 38102 - DNA, 20 bp, Haemophilus actinemycetemcomitans
gattggggtttagccctggt

SEQ ID NO: 38103 - DNA, 20 bp, Bacteroides forsythus
agagggataacccggcgaaa

SEQ ID NO: 38104 - DNA, 20 bp, Actinomyces radingae
gtgggcggtcacattgggac

SEQ ID NO: 38105 - DNA, 20 bp, Bacteroides capilosus
aaaaccacgggctcaacctg

SEQ ID NO: 38106 - DNA, 20 bp, Bacteroides capilosus
gaaactgtagttcttgagtg

SEQ ID NO: 38107 - DNA, 20 bp, Propionibacterium acnes
gtacagagagtggcgagcct

SEQ ID NO: 38108 - DNA, 20 bp, Anaerococcus prevotii
atctttagttaccagcattt

SEQ ID NO: 38109 - DNA, 20 bp, Bacillus firmus
cggatgggagcttgctccca

SEQ ID NO: 38110 - DNA, 20 bp, Neisseria lactamica
ggcagtgggggataactgat

SEQ ID NO: 38111 - DNA, 20 bp, Tissierella praeacuta
catttggaggcagctgtcga

SEQ ID NO: 38112 - DNA, 20 bp, Clostridium barati
gttcaacacctctgtgccgc

SEQ ID NO: 38113 - DNA, 20 bp, Cardiobacterium hominis
gatggagcttgctccaggcg

SEQ ID NO: 38114 - DNA, 20 bp, Arcanobacterium bernardiae
ggcaggttactgggccacca

SEQ ID NO: 38115 - DNA, 20 bp, Porphyromonas levii
cgatagcgaaggcatattac

SEQ ID NO: 38116 - DNA, 20 bp, Anaerobiospirillum succiniciproducens
gaaacgataccgtgaggtgg

SEQ ID NO: 38117 - DNA, 20 bp, Prevotella melaninogenica
caatggacgtcgaccggcgc

SEQ ID NO: 38118 - DNA, 20 bp, Ochrobactrum intermedium
tgaaagatttatcggtgatg

SEQ ID NO: 38119 - DNA, 20 bp, Mannheimia haemolytica
aacagtcgattgacgttaat

SEQ ID NO: 38120 - DNA, 20 bp, Prevotella denticola
gtctgaattgcagcgcatac

SEQ ID NO: 38121 - DNA, 20 bp, Bacteroides merdae
ccgagaggctgaaccagcca

SEQ ID NO: 38122 - DNA, 20 bp, Tetragenococcus halophilus
cccaaagtcggtgcggcaac

SEQ ID NO: 38123 - DNA, 20 bp, Propionibacterium freudenreichii
tccaggaaactggtggtaat

SEQ ID NO: 38124 - DNA, 20 bp, Tetragenococcus halophilus
ctatccatcagcgggggata

SEQ ID NO: 38125 - DNA, 20 bp, Facklamia ignava
ggaatgggaaagacggcttc

SEQ ID NO: 38126 - DNA, 20 bp, Actinomyces neuii
ttttggtgagagtggcgaac

SEQ ID NO: 38127 - DNA, 20 bp, Paenibacillus popilliae
aacgccttgtagagtaactg

SEQ ID NO: 38128 - DNA, 20 bp, Moraxella lacunata
accagtcgttgggtctcttg

SEQ ID NO: 38129 - DNA, 20 bp, Arcanobacterium bernardiae
actgggccaccactgacgct

SEQ ID NO: 38130 - DNA, 20 bp, Micrococcus luteus
aggcttgacatgttctcgat

SEQ ID NO: 38131 - DNA, 20 bp, Comamonas testosteroni
gtacggaacgaaaagcctgg

SEQ ID NO: 38132 - DNA, 20 bp, Campylobacter lari
tatagagatatgagggtgct

SEQ ID NO: 38133 - DNA, 20 bp, Bacteroides forsythus
gatcacgcagaactccgatt

SEQ ID NO: 38134 - DNA, 20 bp, Streptococcus agalactiae
ctgaggtttggtgtttacac

SEQ ID NO: 38135 - DNA, 20 bp, Enterobacter sakazakii
aactggtcagcttgagtctc

SEQ ID NO: 38136 - DNA, 20 bp, Clostridium paraputrificum
gtaagggaggaagccaccta

SEQ ID NO: 38137 - DNA, 20 bp, Moraxella  catarrhalis
atactggataactagagtag

SEQ ID NO: 38138 - DNA, 20 bp, Eggerthella lenta
cccggccggatcccgaactg

SEQ ID NO: 38139 - DNA, 20 bp, Corynebacterium glucuronolyticum
tgcgtgtgcgacaccgtgag

SEQ ID NO: 38140 - DNA, 20 bp, Bacteroides distasonis
cgtgttacaatggcgtggac

SEQ ID NO: 38141 - DNA, 20 bp, Bacillus lentus
gggaagaccctgtctccagg

SEQ ID NO: 38142 - DNA, 20 bp, Campylobacter concisus
gccattgtggaaagtttttt

SEQ ID NO: 38143 - DNA, 20 bp, Alicyclobacillus acidocaldarius
tttcactccagacttgctcg

SEQ ID NO: 38144 - DNA, 20 bp, Fusobacterium mortiferum
gtctaggcggtttggtaagt

SEQ ID NO: 38145 - DNA, 20 bp, Cardiobacterium hominis
ctgccttttgctgggggata

SEQ ID NO: 38146 - DNA, 20 bp, Prevotella intermedia
agacggcctaatacccgatg

SEQ ID NO: 38147 - DNA, 20 bp, Neisseria subflava
acatcagcggctgatgacgg

SEQ ID NO: 38148 - DNA, 20 bp, Stenotrophomonas maltophilia
ctgcagtggatactggatga

SEQ ID NO: 38149 - DNA, 20 bp, Bacteroides thetaiotaomicron
cccgggcttaaattgcattt

SEQ ID NO: 38150 - DNA, 20 bp, Porphyromonas endodontalis
gcgtaaccgcaaggggcgct

SEQ ID NO: 38151 - DNA, 20 bp, Staphylococcus aureus
gcgaacggacgagaagcttg

SEQ ID NO: 38152 - DNA, 20 bp, Bacillus megaterium
cttctccttcatgggagatg

SEQ ID NO: 38153 - DNA, 20 bp, Alcaligenes faecalis
tgttggggccgttaggcctt

SEQ ID NO: 38154 - DNA, 20 bp, Prevotella loescheii
tgccgggcactctggagata

SEQ ID NO: 38155 - DNA, 20 bp, Helcococcus kunzii
agatgaggggaaagtggaat

SEQ ID NO: 38156 - DNA, 20 bp, Porphyromonas endodontalis
actagatttttgcgatatac

SEQ ID NO: 38157 - DNA, 20 bp, Kingella kingae
aagaaaaggttgatgctaat

SEQ ID NO: 38158 - DNA, 20 bp, Tetragenococcus halophilus
cggtgcggcaacccttaggg

SEQ ID NO: 38159 - DNA, 20 bp, Campylobacter lari
atagagatatgagggtgcta

SEQ ID NO: 38160 - DNA, 20 bp, Corynebacterium falsenii
ttgcttgcaggggtactcga

SEQ ID NO: 38161 - DNA, 20 bp, Bacillus pallidus
accgcatggttttcggttga

SEQ ID NO: 38162 - DNA, 20 bp, Bacteroides forsythus
agctgtgaggaaggttggga

SEQ ID NO: 38163 - DNA, 20 bp, Prevotella intermedia
ccggtacagagggacggtgc

SEQ ID NO: 38164 - DNA, 20 bp, Gemella bergeri
accgaaagggaggagccggt

SEQ ID NO: 38165 - DNA, 20 bp, Facklamia sourekii
gtgaaatcctacgggacaag

SEQ ID NO: 38166 - DNA, 20 bp, Kingella denitrificans
ggcagcgggggtgcttgcac

SEQ ID NO: 38167 - DNA, 20 bp, Paenibacillus apiarius
actcctgatgcttagcggcg

SEQ ID NO: 38168 - DNA, 20 bp, Abiotrophia defectiva
gcgtgtgacggtatctaacc

SEQ ID NO: 38169 - DNA, 20 bp, Atopobium parvulum
accttttaggagggagacgc

SEQ ID NO: 38170 - DNA, 20 bp, Methylobacterium mesophilicum
ggcgtgttacccagagagat

SEQ ID NO: 38171 - DNA, 20 bp, Streptococcus salivarius
gtaagtcaagaacgagtgtg

SEQ ID NO: 38172 - DNA, 20 bp, Tetragenococcus halophilus
acgagcaagccaagccgcaa

SEQ ID NO: 38173 - DNA, 20 bp, Campylobacter sputorum
taaatataaattattactaa

SEQ ID NO: 38174 - DNA, 20 bp, Clostridium ramosum
aagtaacctgccctagacag

SEQ ID NO: 38175 - DNA, 20 bp, Lactococcus lactis
gtagagaagaacgttggtga

SEQ ID NO: 38176 - DNA, 20 bp, Corynebacterium xerosis
ggaccgcaccgtgagggtgt

SEQ ID NO: 38177 - DNA, 20 bp, Arthrobacter globiformis
attggtcttggatggactcg

SEQ ID NO: 38178 - DNA, 20 bp, Paenibacillus apiarius
atgtaagttgggtgtttaaa

SEQ ID NO: 38179 - DNA, 20 bp, Bacillus alcalophilus
ttcttttgtaaaagatggct

SEQ ID NO: 38180 - DNA, 20 bp, Corynebacterium jeikeium
gaacggaaaggccctttgct

SEQ ID NO: 38181 - DNA, 20 bp, Gemella haemolysans
catactgtgaggacacaaga

SEQ ID NO: 38182 - DNA, 20 bp, Pediococcus dextrinicus
ctagtacaacgagttgcgag

SEQ ID NO: 38183 - DNA, 20 bp, Streptococcus thermophilus
cataacaatggatgacacat

SEQ ID NO: 38184 - DNA, 20 bp, Moraxella osloensis
ggtggctcattaagtcacat

SEQ ID NO: 38185 - DNA, 20 bp, Propionibacterium freudenreichii
ctctcggtggagcggtggaa

SEQ ID NO: 38186 - DNA, 20 bp, Anaerococcus prevotii
cggaataattcggtgccgca

SEQ ID NO: 38187 - DNA, 20 bp, Campylobacter lari
ttaatctgccctacacaaga

SEQ ID NO: 38188 - DNA, 20 bp, Streptococcus sp.
ttaattgaaagatgcaattg

SEQ ID NO: 38189 - DNA, 20 bp, Micrococcus luteus
cggataggagcgcccaccgc

SEQ ID NO: 38190 - DNA, 20 bp, Shewanella algae
gcgctgatggataagcccag

SEQ ID NO: 38191 - DNA, 20 bp, Gemella sanguinis
agaacctgcctcatagacgg

SEQ ID NO: 38192 - DNA, 20 bp, Corynebacterium glucuronolyticum
acatatgtgagattgggcta

SEQ ID NO: 38193 - DNA, 20 bp, Alcaligenes faecalis
gctctcttggcggcgagtgg

SEQ ID NO: 38194 - DNA, 20 bp, Neisseria lactamica
cggctgatgacggtacccga

SEQ ID NO: 38195 - DNA, 20 bp, Streptococcus suis
tcggaacactggtgacaggt

SEQ ID NO: 38196 - DNA, 20 bp, Bacteroides uniformis
tatcgatagttaccatcagg

SEQ ID NO: 38197 - DNA, 20 bp, Leptotrichia buccalis
aggaatgccgatgatgaaga

SEQ ID NO: 38198 - DNA, 20 bp, Lactobacillus acidophilus
ttgaccacctaagagattag

SEQ ID NO: 38199 - DNA, 20 bp, Mannheimia haemolytica
aatagaacagtcgattgacg

SEQ ID NO: 38200 - DNA, 20 bp, Bacillus alcalophilus
ttttgtaaaagatggctccg

SEQ ID NO: 38201 - DNA, 20 bp, Facklamia hominis
taccgcatagaatcgcagat

SEQ ID NO: 38202 - DNA, 20 bp, Haemophilus segnis
cgtagagtcgagagacgaaa

SEQ ID NO: 38203 - DNA, 20 bp, Streptococcus acidominimus
atttactctgtgacggtagc

SEQ ID NO: 38204 - DNA, 20 bp, Geobacillus thermoglucosidasius
cttccgcttggttagcggcg

SEQ ID NO: 38205 - DNA, 20 bp, Actinomyces neuii
tggtgtctacagagggttgc

SEQ ID NO: 38206 - DNA, 20 bp, Fusobacterium nucleatum
tgaatgctaatacctgatat

SEQ ID NO: 38207 - DNA, 20 bp, Peptostreptococcus anaerobius
gtcgaaggtggcgtcgataa

SEQ ID NO: 38208 - DNA, 20 bp, Eggerthella lenta
caagggatggggtcgcggcc

SEQ ID NO: 38209 - DNA, 20 bp, Bacteroides fragilis
ttgtatgtattatatgaata

SEQ ID NO: 38210 - DNA, 20 bp, Corynebacterium amycolatum
cgtaagaaactgccggggtt

SEQ ID NO: 38211 - DNA, 20 bp, Facklamia ignava
tcgcatgactggaatgggaa

SEQ ID NO: 38212 - DNA, 20 bp, Pseudomonas fluorescens
gggtacttacctaatacgtg

SEQ ID NO: 38213 - DNA, 20 bp, Paenibacillus pabuli
gcctgaagagaactggaaag

SEQ ID NO: 38214 - DNA, 20 bp, Stenotrophomonas maltophilia
cagctggttaatacccggtt

SEQ ID NO: 38215 - DNA, 20 bp, Methylobacterium mesophilicum
cccttttggggaaaggcttg

SEQ ID NO: 38216 - DNA, 20 bp, Haemophilus actinemycetemcomitans
tacagagggtaaccaaccag

SEQ ID NO: 38217 - DNA, 20 bp, Gemella sanguinis
aagaatgattgtatagtaac

SEQ ID NO: 38218 - DNA, 20 bp, Prevotella oris
cgattcagagatgatgaggc

SEQ ID NO: 38219 - DNA, 20 bp, Bacteroides vulgatus
tggatgccaatccccaaaac

SEQ ID NO: 38220 - DNA, 20 bp, Streptococcus parauberis
gttaaaggccgtggctcaac

SEQ ID NO: 38221 - DNA, 20 bp, Campylobacter concisus
accagatcgccgcagagata

SEQ ID NO: 38222 - DNA, 20 bp, Propionibacterium propionicus
gatatcgggaggaacaccag

SEQ ID NO: 38223 - DNA, 20 bp, Staphylococcus aureus
agaagcaagcttctcgtccg

SEQ ID NO: 38224 - DNA, 20 bp, Shewanella algae
tgggaatttgcccatttgtg

SEQ ID NO: 38225 - DNA, 20 bp, Clostridium tetani
gagggtccaaccttctgtgc

SEQ ID NO: 38226 - DNA, 20 bp, Anaerobiospirillum succiniciproducens
ataccgtgaggtggagtgga

SEQ ID NO: 38227 - DNA, 20 bp, Pseudoramibacter alactolyticus
ttcgggtgaaattagaactg

SEQ ID NO: 38228 - DNA, 20 bp, Alicyclobacillus acidocaldarius
agaagatgcctcctcgcggg

SEQ ID NO: 38229 - DNA, 20 bp, Collinsella aerofaciens
tgtggggggacgatcccccc

SEQ ID NO: 38230 - DNA, 20 bp, Escherichia hermannii
aaggcgatgcggttaataac

SEQ ID NO: 38231 - DNA, 20 bp, Bacteroides ureolyticus
gctttgctagtcaaggcagt

SEQ ID NO: 38232 - DNA, 20 bp, Neisseria subflava
ggtgactcgagtgtgtcaga

SEQ ID NO: 38233 - DNA, 20 bp, Clostridium ramosum
gcacttgtgctcgagtggcg

SEQ ID NO: 38234 - DNA, 20 bp, Arcanobacterium bernardiae
ccggatattctgctttcatc

SEQ ID NO: 38235 - DNA, 20 bp, Lactococcus lactis
aactttaaacataagtttta

SEQ ID NO: 38236 - DNA, 20 bp, Gemella haemolysans
ggaagaatgattgtgtagta

SEQ ID NO: 38237 - DNA, 20 bp, Actinomyces bovis
gttaaagttcggggcttaac

SEQ ID NO: 38238 - DNA, 20 bp, Anaerococcus prevotii
aaatcttgacagaacccttc

SEQ ID NO: 38239 - DNA, 20 bp, Helcococcus ovis
tctggaatctaactgacgct

SEQ ID NO: 38240 - DNA, 20 bp, Corynebacterium group F
ttggatattgttgtggaaag

SEQ ID NO: 38241 - DNA, 20 bp, Veillonella atypica
cattgatggacagaaccaga

SEQ ID NO: 38242 - DNA, 20 bp, Clostridium ramosum
aggatggacttatggcgcat

SEQ ID NO: 38243 - DNA, 20 bp, Streptococcus thermophilus
atcctttccgggattcagtg

SEQ ID NO: 38244 - DNA, 20 bp, Bacillus alcalophilus
acatggttcttttgtaaaag

SEQ ID NO: 38245 - DNA, 20 bp, Chromobacterium violaceum
ttcaccagaagtgggtaggc

SEQ ID NO: 38246 - DNA, 20 bp, Staphylococcus haemolyticus
acatacgtgtaagtaactag

SEQ ID NO: 38247 - DNA, 20 bp, Corynebacterium mycetoides
gtaagtccacggcttaactg

SEQ ID NO: 38248 - DNA, 20 bp, Streptococcus equi
tgttagagaagaacagtgat

SEQ ID NO: 38249 - DNA, 20 bp, Collinsella aerofaciens
gacgatccccccgtgccgca

SEQ ID NO: 38250 - DNA, 20 bp, Bacteroides ureolyticus
ggatgctaaaatagctacct

SEQ ID NO: 38251 - DNA, 20 bp, Facklamia languida
caagggcaagcgaatctctt

SEQ ID NO: 38252 - DNA, 20 bp, Propionibacterium freudenreichii
taatcccgaatatgagcctg

SEQ ID NO: 38253 - DNA, 20 bp, Weeksella virosa
attagttgccagcgtttaaa

SEQ ID NO: 38254 - DNA, 20 bp, Fusobacterium varium
tattatgactgagtcgcatg

SEQ ID NO: 38255 - DNA, 20 bp, Corynebacterium jeikeium
gttttatttacgattcccgt

SEQ ID NO: 38256 - DNA, 20 bp, Anaerococcus prevotii
ttaaaaagaataccggtggc

SEQ ID NO: 38257 - DNA, 20 bp, Bacillus schlegellii
gcggaagccttcgggcggaa

SEQ ID NO: 38258 - DNA, 20 bp, Bacillus coagulans
aggctgttcccctgaggagt

SEQ ID NO: 38259 - DNA, 20 bp, Prevotella melaninogenica
agtgcttgcactcaatggac

SEQ ID NO: 38260 - DNA, 20 bp, Bacillus azotoformans
tgctacaatggatggacaaa

SEQ ID NO: 38261 - DNA, 20 bp, Campylobacter coli
tgttgctctgctagtcaggg

SEQ ID NO: 38262 - DNA, 20 bp, Paenibacillus macerans
ccagggaagaacgtcttgtg

SEQ ID NO: 38263 - DNA, 20 bp, Lactococcus lactis
ttaaacataagttttaagtt

SEQ ID NO: 38264 - DNA, 20 bp, Corynebacterium glucuronolyticum
gtctaataccctataggacc

SEQ ID NO: 38265 - DNA, 20 bp, Facklamia ignava
tggagttgcattggaaactg

SEQ ID NO: 38266 - DNA, 20 bp, Moraxella bovis
cgatgactatctagcttgct

SEQ ID NO: 38267 - DNA, 20 bp, Atopobium parvulum
caatgatgggtagctgggtt

SEQ ID NO: 38268 - DNA, 20 bp, Shewanella algae
ggaatttgcccatttgtggg

SEQ ID NO: 38269 - DNA, 20 bp, Comamonas terrigena
aataccctggagtcatgacg

SEQ ID NO: 38270 - DNA, 20 bp, Haemophilus actinemycetemcomitans
tggtgtgttaatagcatgcc

SEQ ID NO: 38271 - DNA, 20 bp, Streptococcus criceti
cttgacatcccgatgccatc

SEQ ID NO: 38272 - DNA, 20 bp, Prevotella oralis
ggtggaggtgctgcatggtt

SEQ ID NO: 38273 - DNA, 20 bp, Propionibacterium freudenreichii
gtggtaatcccgaatatgag

SEQ ID NO: 38274 - DNA, 20 bp, Bacillus flexus
tcgagcgaactgattagaag

SEQ ID NO: 38275 - DNA, 20 bp, Moraxella lacunata
tcttacgagagaaagggggc

SEQ ID NO: 38276 - DNA, 20 bp, Pseudoramibacter alactolyticus
tgaaaactccggtgccatag

SEQ ID NO: 38277 - DNA, 20 bp, Eggerthella lenta
caacccccggccggatcccg

SEQ ID NO: 38278 - DNA, 20 bp, Listeria monocytogenes
ccacgcttttgaaagatggt

SEQ ID NO: 38279 - DNA, 20 bp, Escherichia hermannii
tgcggttaataaccgcgtcg

SEQ ID NO: 38280 - DNA, 20 bp, Chromobacterium violaceum
gaggaaatcccgctggttaa

SEQ ID NO: 38281 - DNA, 20 bp, Anaerococcus prevotii
taggtatcggaataattcgg

SEQ ID NO: 38282 - DNA, 20 bp, Campylobacter rectus
gttgcttcgctagtcgaggc

SEQ ID NO: 38283 - DNA, 20 bp, Corynebacterium urealyticum
taggtgtggggatttttcac

SEQ ID NO: 38284 - DNA, 20 bp, Prevotella intermedia
gcgcctggcgttagcggcta

SEQ ID NO: 38285 - DNA, 20 bp, Lactococcus garvieae
tcctaaggtaagaccgatga

SEQ ID NO: 38286 - DNA, 20 bp, Kocuria kristinae
gagatggttcttcccttttg

SEQ ID NO: 38287 - DNA, 20 bp, Brevibacillus choshinensis
cggatacttctttcagaccg

SEQ ID NO: 38288 - DNA, 20 bp, Bacteroides forsythus
gtcgcttaacgataaaattg

SEQ ID NO: 38289 - DNA, 20 bp, Delftia acidovorans
gggaattagttttctcagta

SEQ ID NO: 38290 - DNA, 20 bp, Bacillus lentus
cttatctctccaggcggaaa

SEQ ID NO: 38291 - DNA, 20 bp, Leuconostoc lactis
aacgcactctcgtttagatt

SEQ ID NO: 38292 - DNA, 20 bp, Corynebacterium glucuronolyticum
cctgcactgggggataagct

SEQ ID NO: 38293 - DNA, 20 bp, Brevibacillus parabrevis
ttttggattgcatgatccga

SEQ ID NO: 38294 - DNA, 20 bp, Actinomyces bovis
atgtgtaatagttatggcgg

SEQ ID NO: 38295 - DNA, 20 bp, Actinomyces naeslundii
cgcatgaaagtgtggctaat

SEQ ID NO: 38296 - DNA, 20 bp, Streptococcus gordonii
caagtagaacgcacagttta

SEQ ID NO: 38297 - DNA, 20 bp, Granulicatella adiacens
gcttgcactggtcaatctag

SEQ ID NO: 38298 - DNA, 20 bp, Bacteroides capilosus
aaccgcaaggagggcgcggc

SEQ ID NO: 38299 - DNA, 20 bp, Eremococcus coleocola
gaatctcttaaagtcgttct

SEQ ID NO: 38300 - DNA, 20 bp, Clostridium ramosum
cataagtaacctgccctaga

SEQ ID NO: 38301 - DNA, 20 bp, Bacteroides uniformis
tgatgctaatccctaaagcc

SEQ ID NO: 38302 - DNA, 20 bp, Bacillus thuringiensis
aaccgcatggttcgaaattg

SEQ ID NO: 38303 - DNA, 20 bp, Clostridium paraputrificum
tgggaagtcccttcggggac

SEQ ID NO: 38304 - DNA, 20 bp, Bacteroides fragilis
cgggtgaccgtatgctaatc

SEQ ID NO: 38305 - DNA, 20 bp, Tetragenococcus halophilus
atggctttttttcacctgaa

SEQ ID NO: 38306 - DNA, 20 bp, Neisseria lactamica
acttttgtcggggaagaaaa

SEQ ID NO: 38307 - DNA, 20 bp, Paenibacillus validus
actgaaaactgggagacttg

SEQ ID NO: 38308 - DNA, 20 bp, Clostridium botulinum
aaacttataaaacctatctc

SEQ ID NO: 38309 - DNA, 20 bp, Paenibacillus macerans
taataccggatacgcaactc

SEQ ID NO: 38310 - DNA, 20 bp, Tissierella praeacuta
gcttgacatgcccctgaccg

SEQ ID NO: 38311 - DNA, 20 bp, Vibrio cholerae
cctctaccgggcaatttccc

SEQ ID NO: 38312 - DNA, 20 bp, Anaerococcus tetradius
cgacgaataataccctatga

SEQ ID NO: 38313 - DNA, 20 bp, Corynebacterium urealyticum
ggataggaccaatctttagt

SEQ ID NO: 38314 - DNA, 20 bp, Kytococcus sedentarius
ttcagggcttaaccctggac

SEQ ID NO: 38315 - DNA, 20 bp, Proteus mirabilis
cggaccttgcactatcggat

SEQ ID NO: 38316 - DNA, 20 bp, Leptotrichia buccalis
gttcactggacggtaactga

SEQ ID NO: 38317 - DNA, 20 bp, Bordetella bronchiseptica
taatatcctgtgcaactgac

SEQ ID NO: 38318 - DNA, 20 bp, Fusobacterium varium
ctaggcggtttagtaagtct

SEQ ID NO: 38319 - DNA, 20 bp, Capnocytophaga gingivalis
ggactaacagacaattgacg

SEQ ID NO: 38320 - DNA, 20 bp, Campylobacter coli
gctctgctagtcagggcagt

SEQ ID NO: 38321 - DNA, 20 bp, Haemophilus haemolyticus
gacgaaagtgcgggaccgca

SEQ ID NO: 38322 - DNA, 20 bp, Facklamia sourekii
ttgtttctcttgacgtgagt

SEQ ID NO: 38323 - DNA, 20 bp, Corynebacterium propinquum
gtggctcaaactcgtttagg

SEQ ID NO: 38324 - DNA, 20 bp, Neisseria polysaccharea
ataaccgcaaggggtccgct

SEQ ID NO: 38325 - DNA, 20 bp, Bacteroides thetaiotaomicron
acccgatggtataatcagac

SEQ ID NO: 38326 - DNA, 20 bp, Burkholderia multivorans
aatccttggctctaatacag

SEQ ID NO: 38327 - DNA, 20 bp, Corynebacterium amycolatum
tcaccatcgacgaagggttt

SEQ ID NO: 38328 - DNA, 20 bp, Tissierella praeacuta
ggaatgaaactttaattatc

SEQ ID NO: 38329 - DNA, 20 bp, Brochothrix campestris
gaaatcgatgctaataccga

SEQ ID NO: 38330 - DNA, 20 bp, Alicyclobacillus acidocaldarius
cttcgcctccctttgttccg

SEQ ID NO: 38331 - DNA, 20 bp, Leptotrichia buccalis
ggcggccagacaagtctggg

SEQ ID NO: 38332 - DNA, 20 bp, Prevotella intermedia
acgcaacgtatgcggaattc

SEQ ID NO: 38333 - DNA, 20 bp, Haemophilus actinemycetemcomitans
agtcggacggtagcaggtaa

SEQ ID NO: 38334 - DNA, 20 bp, Clostridium paraputrificum
taccatgtaatgtgggaagt

SEQ ID NO: 38335 - DNA, 20 bp, Streptococcus parasanguinis
ggtgcaaatgcatcactaag

SEQ ID NO: 38336 - DNA, 20 bp, Gemella sanguinis
actatatacagtagagacgg

SEQ ID NO: 38337 - DNA, 20 bp, Fusobacterium varium
aggagggatgttccgagggt

SEQ ID NO: 38338 - DNA, 20 bp, Streptococcus anginosus
caattgcatcgctagtagat

SEQ ID NO: 38339 - DNA, 20 bp, Anaerococcus tetradius
tatgggaagaaaatgacagt

SEQ ID NO: 38340 - DNA, 20 bp, Bacteroides merdae
tcccgcatgggaatatttgt

SEQ ID NO: 38341 - DNA, 20 bp, Corynebacterium mycetoides
aggatgagcgctggcggcgt

SEQ ID NO: 38342 - DNA, 20 bp, Propionibacterium acnes
gcctaaccgttgtgggggag

SEQ ID NO: 38343 - DNA, 20 bp, Tetragenococcus halophilus
cggcaacccttaggggagcc

SEQ ID NO: 38344 - DNA, 20 bp, Corynebacterium auris
agcctcttccacggggttcg

SEQ ID NO: 38345 - DNA, 20 bp, Anaerococcus tetradius
gagtgttaggtgtctggaat

SEQ ID NO: 38346 - DNA, 20 bp, Streptococcus infantarius
ctatctctaggaatagcatc

SEQ ID NO: 38347 - DNA, 20 bp, Prevotella loescheii
aaatccgggtgctcaacatc

SEQ ID NO: 38348 - DNA, 20 bp, Bacteroides ovatus
atattggaaacagtatagcc

SEQ ID NO: 38349 - DNA, 20 bp, Anaerococcus tetradius
ttaggtgtctggaataatct

SEQ ID NO: 38350 - DNA, 20 bp, Prevotella intermedia
gcaacgtatgcggaattcat

SEQ ID NO: 38351 - DNA, 20 bp, Acinetobacter haemolyticus
agcggggaagggtagcttgc

SEQ ID NO: 38352 - DNA, 20 bp, Bacteroides merdae
aatctccaaaccatgtctca

SEQ ID NO: 38353 - DNA, 20 bp, Tissierella praeacuta
gcgataagatgctaatctct

SEQ ID NO: 38354 - DNA, 20 bp, Corynebacterium urealyticum
aagctggagtgctgtagggg

SEQ ID NO: 38355 - DNA, 20 bp, Bacteroides uniformis
tactgggtgtcttgagtaca

SEQ ID NO: 38356 - DNA, 20 bp, Gemella haemolysans
ggttagacacagatacaggt

SEQ ID NO: 38357 - DNA, 20 bp, Acinetobacter haemolyticus
ggctgattaagtcggatgtg

SEQ ID NO: 38358 - DNA, 20 bp, Aerococcus viridans
accttgcggtgcattagtta

SEQ ID NO: 38359 - DNA, 20 bp, Bacillus coagulans
gacctcacgccaccggatgt

SEQ ID NO: 38360 - DNA, 20 bp, Lactococcus garvieae
ctgatgtaaaaggcagtggc

SEQ ID NO: 38361 - DNA, 20 bp, Vagococcus fluvialis
gcaagtcgaacgctttgatt

SEQ ID NO: 38362 - DNA, 20 bp, Dermacoccus nishinomiyaensis
ttttgtggtgggggatggac

SEQ ID NO: 38363 - DNA, 20 bp, Streptococcus dysgalactiae
gttgttagagaagaatgatg

SEQ ID NO: 38364 - DNA, 20 bp, Nocardia asteroides
gcgggggaggttgcttcggt

SEQ ID NO: 38365 - DNA, 20 bp, Dolosigranulum pigrum
ggatgctaataccccatagg

SEQ ID NO: 38366 - DNA, 20 bp, Streptococcus agalactiae
cataagagtaattaacacat

SEQ ID NO: 38367 - DNA, 20 bp, Atopobium parvulum
gggtgtgtataaagtggcga

SEQ ID NO: 38368 - DNA, 20 bp, Rhodococcus equi
tacgttttcccttgtggttt

SEQ ID NO: 38369 - DNA, 20 bp, Alcaligenes faecalis
gaagagatttggccgtgctc

SEQ ID NO: 38370 - DNA, 20 bp, Alicyclobacillus acidocaldarius
aagcagtttccaaagccatc

SEQ ID NO: 38371 - DNA, 20 bp, Streptococcus hyovaginalis
tgttaatgatttaaaaggag

SEQ ID NO: 38372 - DNA, 20 bp, Leuconostoc lactis
gaacgcactctcgtttagat

SEQ ID NO: 38373 - DNA, 20 bp, Methylobacterium mesophilicum
catggcgtgttatggggaga

SEQ ID NO: 38374 - DNA, 20 bp, Bacteroides forsythus
accgggcgaccggatgccaa

SEQ ID NO: 38375 - DNA, 20 bp, Empedobacter brevis
agagggtgaacccccacact

SEQ ID NO: 38376 - DNA, 20 bp, Eggerthella lenta
gcggcctctcaagcgggatc

SEQ ID NO: 38377 - DNA, 20 bp, Clostridium ramosum
gcctgcaactgacgctcagt

SEQ ID NO: 38378 - DNA, 20 bp, Brevibacillus choshinensis
tggtcacgtacagatgggcc

SEQ ID NO: 38379 - DNA, 20 bp, Alicyclobacillus acidocaldarius
actggggtgtgtccccccaa

SEQ ID NO: 38380 - DNA, 20 bp, Veillonella dispar
gatagatgaaaggtggcctc

SEQ ID NO: 38381 - DNA, 20 bp, Citrobacter sedlakii
cggaagactgcagagatgcg

SEQ ID NO: 38382 - DNA, 20 bp, Corynebacterium auris
tgtgtaagtccatggcttaa

SEQ ID NO: 38383 - DNA, 20 bp, Streptococcus parauberis
gtagaacgctgaagactggt

SEQ ID NO: 38384 - DNA, 20 bp, Prevotella melaninogenica
ccttgagtacgcacaacgtt

SEQ ID NO: 38385 - DNA, 20 bp, Bacillus coagulans
gctaataccagatagttttt

SEQ ID NO: 38386 - DNA, 20 bp, Bacteroides fragilis
caacctgccctttactcggg

SEQ ID NO: 38387 - DNA, 20 bp, Bacteroides vulgatus
gccgctaccacgcgagtgga

SEQ ID NO: 38388 - DNA, 20 bp, Bacteroides thetaiotaomicron
ggacagttaagtcagttgtg

SEQ ID NO: 38389 - DNA, 20 bp, Prevotella bivia
aacctacccataactaaggg

SEQ ID NO: 38390 - DNA, 20 bp, Streptococcus bovis
caagtagaacgctgactact

SEQ ID NO: 38391 - DNA, 20 bp, Alcaligenes faecalis
ggccgttaggccttagtagc

SEQ ID NO: 38392 - DNA, 20 bp, Fusobacterium nucleatum
caggtagggacaacatttgg

SEQ ID NO: 38393 - DNA, 20 bp, Fusobacterium nucleatum
gagagtcgcaaagccgtgag

SEQ ID NO: 38394 - DNA, 20 bp, Aneurinibacillus aneurinilyticus
tgaaagagaaagacctttgg

SEQ ID NO: 38395 - DNA, 20 bp, Clostridium subterminale
gttctgtcatatgggaagat

SEQ ID NO: 38396 - DNA, 20 bp, Helcococcus kunzii
attgtaaagttctgtcctta

SEQ ID NO: 38397 - DNA, 20 bp, Bacillus flexus
aactgattagaagcttgctt

SEQ ID NO: 38398 - DNA, 20 bp, Arthrobacter globiformis
gacatggaccggaccgccgc

SEQ ID NO: 38399 - DNA, 20 bp, Abiotrophia defectiva
ctaataccgcataggacatg

SEQ ID NO: 38400 - DNA, 20 bp, Bacteroides caccae
acctcatactcggggatagc

SEQ ID NO: 38401 - DNA, 20 bp, Arcanobacterium haemolyticum
actccggggctgcagtgggt

SEQ ID NO: 38402 - DNA, 20 bp, Oligella urethralis
cccccactaccgggcacgtt

SEQ ID NO: 38403 - DNA, 20 bp, Bacteroides fragilis
tcgaggggcatcaggaagaa

SEQ ID NO: 38404 - DNA, 20 bp, Clostridium clostridiiforme
ctgtttgacttgagtgcagg

SEQ ID NO: 38405 - DNA, 20 bp, Pediococcus dextrinicus
aactctgttattggagaaga

SEQ ID NO: 38406 - DNA, 20 bp, Clostridium subterminale
ataccgcataatatgttttt

SEQ ID NO: 38407 - DNA, 20 bp, Bacteroides ovatus
agtagcgtgaaggatgaagg

SEQ ID NO: 38408 - DNA, 20 bp, Prevotella loescheii
atactgccaccgcaaggtgc

SEQ ID NO: 38409 - DNA, 20 bp, Serratia marcescens
aatacgctcatcaattgacg

SEQ ID NO: 38410 - DNA, 20 bp, Fusobacterium mortiferum
tgcagtctgggacaacattt

SEQ ID NO: 38411 - DNA, 20 bp, Bacillus lentus
tatctctccaggcggaaaga

SEQ ID NO: 38412 - DNA, 20 bp, Streptococcus ratti
tgctttggaaactgcaggac

SEQ ID NO: 38413 - DNA, 20 bp, Abiotrophia defectiva
agcgcatagagtaactgtta

SEQ ID NO: 38414 - DNA, 20 bp, Corynebacterium group F
ttttggatattgttgtggaa

SEQ ID NO: 38415 - DNA, 20 bp, Prevotella melaninogenica
gacgctcaacgtctgacttg

SEQ ID NO: 38416 - DNA, 20 bp, Alloiococcus otitis
ccgtggaacggcattggaaa

SEQ ID NO: 38417 - DNA, 20 bp, Fusobacterium necrogenes
gaattcatatgaaagctata

SEQ ID NO: 38418 - DNA, 20 bp, Enterobacter gergoviae
ggggaggaagggagtgaggt

SEQ ID NO: 38419 - DNA, 20 bp, Corynebacterium glucuronolyticum
agctaatcgcgaaagccagt

SEQ ID NO: 38420 - DNA, 20 bp, Clostridium paraputrificum
agttggtgatctaacccgta

SEQ ID NO: 38421 - DNA, 20 bp, Porphyromonas endodontalis
tgattacagatgggcatgcg

SEQ ID NO: 38422 - DNA, 20 bp, Chromobacterium violaceum
agtgggtaggctaaccgcaa

SEQ ID NO: 38423 - DNA, 20 bp, Streptococcus agalactiae
taattaacacatgttagtta

SEQ ID NO: 38424 - DNA, 20 bp, Bacillus lentus
gaagaccctgtctccagggc

SEQ ID NO: 38425 - DNA, 20 bp, Pediococcus dextrinicus
aagctaatctctaaaagcta

SEQ ID NO: 38426 - DNA, 20 bp, Weissella paramesenteroides
tcgaacgctttgtctttaac

SEQ ID NO: 38427 - DNA, 20 bp, Corynebacterium mycetoides
tacaacgcgtgtgcgacact

SEQ ID NO: 38428 - DNA, 20 bp, Lactococcus lactis
gaaagctcatcaagtgacgg

SEQ ID NO: 38429 - DNA, 20 bp, Fusobacterium varium
tcgtgcctcttcggaggaac

SEQ ID NO: 38430 - DNA, 20 bp, Anaerobiospirillum succiniciproducens
acgataccgtgaggtggagt

SEQ ID NO: 38431 - DNA, 20 bp, Pseudoramibacter alactolyticus
catggcaagatcatgaaaac

SEQ ID NO: 38432 - DNA, 20 bp, Clostridium glycolicum
ggcagccaagtcgtgaggcc

SEQ ID NO: 38433 - DNA, 20 bp, Photobacterium damselae
gggaacgttaagggcggcga

SEQ ID NO: 38434 - DNA, 20 bp, Campylobacter concisus
ttggatgccattgtggaaag

SEQ ID NO: 38435 - DNA, 20 bp, Prevotella bivia
attctcagttcggactgggg

SEQ ID NO: 38436 - DNA, 20 bp, Alcaligenes faecalis
aggtactgctgacggtatct

SEQ ID NO: 38437 - DNA, 20 bp, Fusobacterium mortiferum
tcagttgggacgaagtaagt

SEQ ID NO: 38438 - DNA, 20 bp, Streptococcus anginosus
ggaaagttcatactgtgacg

SEQ ID NO: 38439 - DNA, 20 bp, Chromobacterium violaceum
ctgttgggggtttgaatcct

SEQ ID NO: 38440 - DNA, 20 bp, Corynebacterium auris
gctaggtgtgagcctcttcc

SEQ ID NO: 38441 - DNA, 20 bp, Anaerococcus prevotii
tagacattgggatagcctcg

SEQ ID NO: 38442 - DNA, 20 bp, Streptococcus ratti
gctaataccgcataagagag

SEQ ID NO: 38443 - DNA, 20 bp, Anaerococcus prevotii
aaatgcaagtcaggtgtaaa

SEQ ID NO: 38444 - DNA, 20 bp, Paenibacillus lautus
ccccagggctcaaccctggg

SEQ ID NO: 38445 - DNA, 20 bp, Brochothrix campestris
tttcggctgtcactgtgaga

SEQ ID NO: 38446 - DNA, 20 bp, Bacillus lentus
ctcatgcgtcgccgcttcgc

SEQ ID NO: 38447 - DNA, 20 bp, Campylobacter concisus
tgccattgtggaaagttttt

SEQ ID NO: 38448 - DNA, 20 bp, Bacillus alcalophilus
aatcaaaggaatcacatggt

SEQ ID NO: 38449 - DNA, 20 bp, Peptoniphilus indolicus
gtgacacatgtcataacgat

SEQ ID NO: 38450 - DNA, 20 bp, Facklamia ignava
agaatagcctgtagagtaac

SEQ ID NO: 38451 - DNA, 20 bp, Eggerthella lenta
acgtgaagccggggaaaccc

SEQ ID NO: 38452 - DNA, 20 bp, Oligella ureolytica
ccacttttctcaacgaagaa

SEQ ID NO: 38453 - DNA, 20 bp, Microbacterium hominis
ccgtagaaatacgggactct

SEQ ID NO: 38454 - DNA, 20 bp, Eggerthella lenta
cccctcctggggggcccggg

SEQ ID NO: 38455 - DNA, 20 bp, Brochothrix campestris
ccgaatgtgctgaacatcat

SEQ ID NO: 38456 - DNA, 20 bp, Staphylococcus condimenti
tatgcggaaccgcatggttc

SEQ ID NO: 38457 - DNA, 20 bp, Actinomyces bovis
caggcggtttatcaagttta

SEQ ID NO: 38458 - DNA, 20 bp, Bacteroides thetaiotaomicron
ctcaccaaaccttcgatgga

SEQ ID NO: 38459 - DNA, 20 bp, Aeromonas sobria
aaactgtccggctagagtct

SEQ ID NO: 38460 - DNA, 20 bp, Streptococcus suis
ggatttttcttcggaacact

SEQ ID NO: 38461 - DNA, 20 bp, Helcococcus ovis
tcgggaagagattaaagaag

SEQ ID NO: 38462 - DNA, 20 bp, Vagococcus fluvialis
tggcctaccaagaccgtgat

SEQ ID NO: 38463 - DNA, 20 bp, Tissierella praeacuta
tcttcggaatgaaactttaa

SEQ ID NO: 38464 - DNA, 20 bp, Streptococcus pneumoniae
catttgcttaaaaggtgcac

SEQ ID NO: 38465 - DNA, 20 bp, Campylobacter rectus
gggaaagaattatgacggta

SEQ ID NO: 38466 - DNA, 20 bp, Staphylococcus pulvereri
accttttattaggagctagc

SEQ ID NO: 38467 - DNA, 20 bp, Aerococcus urinae
gtcacttatcgatggccttg

SEQ ID NO: 38468 - DNA, 20 bp, Stenotrophomonas maltophilia
ctgcagtggatactgggcga

SEQ ID NO: 38469 - DNA, 20 bp, Brevibacillus borstelensis
catgctaataccggataggg

SEQ ID NO: 38470 - DNA, 20 bp, Bacteroides capilosus
aacagagggaagcaatgccg

SEQ ID NO: 38471 - DNA, 20 bp, Bacteroides fragilis
gagcaatcaccgctgtgaag

SEQ ID NO: 38472 - DNA, 20 bp, Aerococcus viridans
cgaacagatgaagtgcttgc

SEQ ID NO: 38473 - DNA, 20 bp, Propionibacterium freudenreichii
gttgatcacgtcggaagtga

SEQ ID NO: 38474 - DNA, 20 bp, Weeksella virosa
ttggacaatgggttagcgcc

SEQ ID NO: 38475 - DNA, 20 bp, Fusobacterium mortiferum
ttcgggtgatggtggcggac

SEQ ID NO: 38476 - DNA, 20 bp, Enterococcus dispar
cctcaagcgggggataacac

SEQ ID NO: 38477 - DNA, 20 bp, Leptotrichia buccalis
tgagaacaggcagtgccttc

SEQ ID NO: 38478 - DNA, 20 bp, Neisseria meningitidis
ctcgccacccgagaagcaag

SEQ ID NO: 38479 - DNA, 20 bp, Streptococcus anginosus
tatgtaacacatgttagatg

SEQ ID NO: 38480 - DNA, 20 bp, Arthrobacter globiformis
gacatgttcctgaccgccgt

SEQ ID NO: 38481 - DNA, 20 bp, Propionibacterium acnes
tgggtgtgcctcttttgggg

SEQ ID NO: 38482 - DNA, 20 bp, Streptococcus equi
tggggtgaagtcgtacaagg

SEQ ID NO: 38483 - DNA, 20 bp, Enterococcus faecalis
tggaaagaggagtggcggac

SEQ ID NO: 38484 - DNA, 20 bp, Methylobacterium mesophilicum
cacctcagtagcgcagctaa

SEQ ID NO: 38485 - DNA, 20 bp, Peptostreptococcus anaerobius
tatccaaccgcaaggaggaa

SEQ ID NO: 38486 - DNA, 20 bp, Corynebacterium urealyticum
gtggggatttttcacgattt

SEQ ID NO: 38487 - DNA, 20 bp, Streptococcus porcinus
tgaaagtagaagacccatgt

SEQ ID NO: 38488 - DNA, 20 bp, Porphyromonas endodontalis
agcgtaaccgcaaggggcgc

SEQ ID NO: 38489 - DNA, 20 bp, Corynebacterium glucuronolyticum
gggtctaataccctatagga

SEQ ID NO: 38490 - DNA, 20 bp, Enterococcus dispar
cctcaagcgggggataacat

SEQ ID NO: 38491 - DNA, 20 bp, Corynebacterium amycolatum
ctccagcttgctggggtaca

SEQ ID NO: 38492 - DNA, 20 bp, Bacteroides fragilis
ccaacctgccctttactcgg

SEQ ID NO: 38493 - DNA, 20 bp, Bacillus lentus
ccgccgctaaccaacaaaaa

SEQ ID NO: 38494 - DNA, 20 bp, Fusobacterium mortiferum
gctgcaggagagctttgcgt

SEQ ID NO: 38495 - DNA, 20 bp, Lactococcus raffinolactis
catactcgtgctattcctag

SEQ ID NO: 38496 - DNA, 20 bp, Gemella morbillorum
agtcagccaacctcataaaa

SEQ ID NO: 38497 - DNA, 20 bp, Propionibacterium avidum
cggcggttttggatggactc

SEQ ID NO: 38498 - DNA, 20 bp, Anaerococcus prevotii
taccctcttcttcggaagcc

SEQ ID NO: 38499 - DNA, 20 bp, Gemella bergeri
gaaggtcattggaaactgat

SEQ ID NO: 38500 - DNA, 20 bp, Kingella kingae
caaggcgacgatcagtagtg

SEQ ID NO: 38501 - DNA, 20 bp, Actinomyces bovis
tggtagactagagtgcagga

SEQ ID NO: 38502 - DNA, 20 bp, Corynebacterium propinquum
tgcactttagtgtgtgtggt

SEQ ID NO: 38503 - DNA, 20 bp, Facklamia languida
agcgaactcgcaagggcaag

SEQ ID NO: 38504 - DNA, 20 bp, Veillonella atypica
cgcgcgcaggcggatcagtc

SEQ ID NO: 38505 - DNA, 20 bp, Oligella ureolytica
cttaagatgctgacggtagt

SEQ ID NO: 38506 - DNA, 20 bp, Pseudomonas fluorescens
agggtacttacctaatacgt

SEQ ID NO: 38507 - DNA, 20 bp, Bacillus pallidus
cgaatcccaaaaaaccactc

SEQ ID NO: 38508 - DNA, 20 bp, Bacteroides capilosus
ggcctgcatttgaaactgta

SEQ ID NO: 38509 - DNA, 20 bp, Veillonella atypica
cgaagagcgatggaagcttg

SEQ ID NO: 38510 - DNA, 20 bp, Actinomyces turicensis
tttgggataacggtcggaaa

SEQ ID NO: 38511 - DNA, 20 bp, Brochothrix campestris
tcataagatgttcaagtgaa

SEQ ID NO: 38512 - DNA, 20 bp, Bacillus sp
aacttttctctccgcatgga

SEQ ID NO: 38513 - DNA, 20 bp, Chryseobacterium meningosepticum
ctacttacgtgtaagtagct

SEQ ID NO: 38514 - DNA, 20 bp, Bacillus sp
tgatcagttagcggcggacg

SEQ ID NO: 38515 - DNA, 20 bp, Prevotella melaninogenica
tgagtgcttgcactcaatgg

SEQ ID NO: 38516 - DNA, 20 bp, Campylobacter curvus
aaatcatctagagatagaag

SEQ ID NO: 38517 - DNA, 20 bp, Pseudomonas fluorescens
aagggtacttacctaatacg

SEQ ID NO: 38518 - DNA, 20 bp, Facklamia ignava
gggaacttgttcctttcaac

SEQ ID NO: 38519 - DNA, 20 bp, Neisseria meningitidis
cgctgatattagcaacagcc

SEQ ID NO: 38520 - DNA, 20 bp, Aerococcus viridans
gaccttgcggtgcattagtt

SEQ ID NO: 38521 - DNA, 20 bp, Enterobacter gergoviae
cggggaggaagggagtgagg

SEQ ID NO: 38522 - DNA, 20 bp, Campylobacter lari
tgaactgcttgggaaactgg

SEQ ID NO: 38523 - DNA, 20 bp, Dermacoccus nishinomiyaensis
aagcaccagcttgctggtgt

SEQ ID NO: 38524 - DNA, 20 bp, Alicyclobacillus acidocaldarius
catcccatggttgagccatg

SEQ ID NO: 38525 - DNA, 20 bp, Gemella morbillorum
gagtcagccaacctcataaa

SEQ ID NO: 38526 - DNA, 20 bp, Aneurinibacillus aneurinilyticus
gggccacttgaaactgggag

SEQ ID NO: 38527 - DNA, 20 bp, Leuconostoc fallax
gctcaactgtggaatggctt

SEQ ID NO: 38528 - DNA, 20 bp, Atopobium parvulum
gcttgacatttaggtgaagc

SEQ ID NO: 38529 - DNA, 20 bp, Aneurinibacillus aneurinilyticus
gagaaagacctttggtcacg

SEQ ID NO: 38530 - DNA, 20 bp, Bacillus mycoides
tttgaactgcatagttcgaa

SEQ ID NO: 38531 - DNA, 20 bp, Clostridium septicum
cgagcgaggggagtttcttc

SEQ ID NO: 38532 - DNA, 20 bp, Anaerococcus tetradius
ctatagctcaactatagtaa

SEQ ID NO: 38533 - DNA, 20 bp, Aerococcus christensenii
tatcacttatcgatggcctt

SEQ ID NO: 38534 - DNA, 20 bp, Staphylococcus aureus
aagcttctcgtccgttcgct

SEQ ID NO: 38535 - DNA, 20 bp, Prevotella melaninogenica
cctggtatcagcggctaagc

SEQ ID NO: 38536 - DNA, 20 bp, Pseudoramibacter alactolyticus
aagatcatgaaaactccggt

SEQ ID NO: 38537 - DNA, 20 bp, Paenibacillus glucanolyticus
gtgataatgaaagacggagc

SEQ ID NO: 38538 - DNA, 20 bp, Gemella bergeri
gttgttagggaagaaaggtt

SEQ ID NO: 38539 - DNA, 20 bp, Anaerococcus prevotii
cgagcgatgaaatcttgaca

SEQ ID NO: 38540 - DNA, 20 bp, Anaerococcus tetradius
ggtacgtaggcggataagca

SEQ ID NO: 38541 - DNA, 20 bp, Alcaligenes faecalis
actgccgagctagagtatgt

SEQ ID NO: 38542 - DNA, 20 bp, Lactococcus lactis
atcactcaaagatgatcccg

SEQ ID NO: 38543 - DNA, 20 bp, Helcococcus kunzii
gcataaaacagatctcagtt

SEQ ID NO: 38544 - DNA, 20 bp, Corynebacterium glucuronolyticum
tccaggggcttaacttttgg

SEQ ID NO: 38545 - DNA, 20 bp, Dermacoccus nishinomiyaensis
tttttgtggtgggggatgga

SEQ ID NO: 38546 - DNA, 20 bp, Helcococcus kunzii
ttgagtagatgaggggaaag

SEQ ID NO: 38547 - DNA, 20 bp, Staphylococcus carnosus
ctatgcgcaccttgacggta

SEQ ID NO: 38548 - DNA, 20 bp, Shewanella algae
gcctgggaatttgcccattt

SEQ ID NO: 38549 - DNA, 20 bp, Eggerthella lenta
aagcgggatctctaatccga

SEQ ID NO: 38550 - DNA, 20 bp, Lactococcus lactis
agatgcaattgcatcactca

SEQ ID NO: 38551 - DNA, 20 bp, Actinomyces bovis
taataccggatacgttaatc

SEQ ID NO: 38552 - DNA, 20 bp, Haemophilus segnis
tagagtcgagagacgaaagt

SEQ ID NO: 38553 - DNA, 20 bp, Gemella haemolysans
ggtcacggtgggacagatga

SEQ ID NO: 38554 - DNA, 20 bp, Paenibacillus peoriae
ttctaaacaacctagcggcg

SEQ ID NO: 38555 - DNA, 20 bp, Leuconostoc pseudomesenteroides
acaaagttaaaaggcgcttt

SEQ ID NO: 38556 - DNA, 20 bp, Corynebacterium glucuronolyticum
gatacgggcattgcttgagt

SEQ ID NO: 38557 - DNA, 20 bp, Streptococcus hyovaginalis
taagcgaagaacgggagtaa

SEQ ID NO: 38558 - DNA, 20 bp, Streptococcus bovis
agaacgctgactactttagc

SEQ ID NO: 38559 - DNA, 20 bp, Corynebacterium glucuronolyticum
gtctgtgtaatccaggggct

SEQ ID NO: 38560 - DNA, 20 bp, Chromobacterium violaceum
caactagctgttgggggttt

SEQ ID NO: 38561 - DNA, 20 bp, Campylobacter rectus
agtagcttgctatttaatct

SEQ ID NO: 38562 - DNA, 20 bp, Gemella bergeri
gaagaaaggttgtgtagtaa

SEQ ID NO: 38563 - DNA, 20 bp, Listeria innocua
gcatgccacgctcttgaaag

SEQ ID NO: 38564 - DNA, 20 bp, Pseudoramibacter alactolyticus
acccaatgaggaagtcccgg

SEQ ID NO: 38565 - DNA, 20 bp, Anaerococcus tetradius
cgactttctggtcatcatct

SEQ ID NO: 38566 - DNA, 20 bp, Arthrobacter globiformis
accggaccgccgcagaaatg

SEQ ID NO: 38567 - DNA, 20 bp, Bacteroides thetaiotaomicron
gcaggcctgaaccagccaag

SEQ ID NO: 38568 - DNA, 20 bp, Prevotella oris
ttcagagatgatgaggccct

SEQ ID NO: 38569 - DNA, 20 bp, Pseudomonas fluorescens
ttgggaggaagggtacttac

SEQ ID NO: 38570 - DNA, 20 bp, Proteus vulgaris
ggggctaataccgcatgacg

SEQ ID NO: 38571 - DNA, 20 bp, Neisseria polysaccharea
taggataaccgcaaggggtc

SEQ ID NO: 38572 - DNA, 20 bp, Actinomyces neuii
ggtttgcgttgggtacgggc

SEQ ID NO: 38573 - DNA, 20 bp, Prevotella loescheii
gtgaaatccgggtgctcaac

SEQ ID NO: 38574 - DNA, 20 bp, Haemophilus haemolyticus
gtgcgggaccgcaaggccgc

SEQ ID NO: 38575 - DNA, 20 bp, Facklamia ignava
ctgttataggtttgacggta

SEQ ID NO: 38576 - DNA, 20 bp, Campylobacter curvus
agctaatctgccccatagtg

SEQ ID NO: 38577 - DNA, 20 bp, Clostridium subterminale
aaacttataaaaccaatccc

SEQ ID NO: 38578 - DNA, 20 bp, Oligella urethralis
aaccagctacagatcaccgc

SEQ ID NO: 38579 - DNA, 20 bp, Prevotella loescheii
tggggagtacgccggcaacg

SEQ ID NO: 38580 - DNA, 20 bp, Campylobacter rectus
ttgcttcgctagtcgaggca

SEQ ID NO: 38581 - DNA, 20 bp, Tetragenococcus halophilus
agtcggtgcggcaaccctta

SEQ ID NO: 38582 - DNA, 20 bp, Streptococcus infantarius
gcttgaaaggagcaattgct

SEQ ID NO: 38583 - DNA, 20 bp, Paenibacillus lautus
ttgtggaataatgaaagacg

SEQ ID NO: 38584 - DNA, 20 bp, Propionibacterium avidum
ccttgctgcatggtgggggt

SEQ ID NO: 38585 - DNA, 20 bp, Cardiobacterium hominis
cacgcaggcggttgcccaag

SEQ ID NO: 38586 - DNA, 20 bp, Finegoldia magna
ttctggacacaaactgacgc

SEQ ID NO: 38587 - DNA, 20 bp, Fusobacterium necrogenes
gttggcagagatgccttcgt

SEQ ID NO: 38588 - DNA, 20 bp, Peptoniphilus indolicus
gtcataacgatcaaagtgaa

SEQ ID NO: 38589 - DNA, 20 bp, Facklamia ignava
ctcaaccgtggagttgcatt

SEQ ID NO: 38590 - DNA, 20 bp, Bacillus schlegellii
caccgggaaaccgggctaat

SEQ ID NO: 38591 - DNA, 20 bp, Actinomyces bovis
tgttgtaagggaagaacgat

SEQ ID NO: 38592 - DNA, 20 bp, Bacillus halodurans
cgagcggaccaaagggagct

SEQ ID NO: 38593 - DNA, 20 bp, Anaerococcus tetradius
gagcgatctgaagcgaaact

SEQ ID NO: 38594 - DNA, 20 bp, Brevibacillus choshinensis
gaacaacgggcagccaactc

SEQ ID NO: 38595 - DNA, 20 bp, Streptococcus agalactiae
acacatgttagttatttaaa

SEQ ID NO: 38596 - DNA, 20 bp, Bacteroides ovatus
ggctgttgtgaaggtgctgc

SEQ ID NO: 38597 - DNA, 20 bp, Actinomyces neuii
ggcgggttactgggccgtta

SEQ ID NO: 38598 - DNA, 20 bp, Clostridium ramosum
gagggagcaggcggcagcaa

SEQ ID NO: 38599 - DNA, 20 bp, Lactococcus lactis
ggtagagaagaacgttggtg

SEQ ID NO: 38600 - DNA, 20 bp, Campylobacter curvus
tatagctaatctgccccata

SEQ ID NO: 38601 - DNA, 20 bp, Bacteroides fragilis
ttttgtatgtattatatgaa

SEQ ID NO: 38602 - DNA, 20 bp, Clostridium ramosum
ttataaaggaagaacggcgg

SEQ ID NO: 38603 - DNA, 20 bp, Bacteroides thetaiotaomicron
tgacaggatgccaatcccaa

SEQ ID NO: 38604 - DNA, 20 bp, Microbacterium hominis
atgagctgcgatcgcatggt

SEQ ID NO: 38605 - DNA, 20 bp, Aerococcus viridans
cagatgaagtgcttgcactt

SEQ ID NO: 38606 - DNA, 20 bp, Salmonella enteritidis
gaagaatccagagatggatt

SEQ ID NO: 38607 - DNA, 20 bp, Pasteurella multocida
atagcatcattgacgttaat

SEQ ID NO: 38608 - DNA, 20 bp, Bacteroides capilosus
aggtgggttcgataattggg

SEQ ID NO: 38609 - DNA, 20 bp, Bacillus fusiformis
aatccgataaagtcgttctc

SEQ ID NO: 38610 - DNA, 20 bp, Facklamia languida
gcaagggcaagcgaatctct

SEQ ID NO: 38611 - DNA, 20 bp, Prevotella intermedia
agtcctacagttccaaaagc

SEQ ID NO: 38612 - DNA, 20 bp, Bacillus alcalophilus
tcaaccccgaggggtcattg

SEQ ID NO: 38613 - DNA, 20 bp, Weeksella virosa
ggcggatcaataagtcagtg

SEQ ID NO: 38614 - DNA, 20 bp, Actinomyces turicensis
cagagatgtggtggcatttg

SEQ ID NO: 38615 - DNA, 20 bp, Burkholderia gladioli
tgtccggaaagaaatcctga

SEQ ID NO: 38616 - DNA, 20 bp, Bacillus megaterium
gataggatcttctccttcat

SEQ ID NO: 38617 - DNA, 20 bp, Propionibacterium freudenreichii
gctttatgcggtcagggatc

SEQ ID NO: 38618 - DNA, 20 bp, Aneurinibacillus thermoaerophilus
gggatgacctcccggtctga

SEQ ID NO: 38619 - DNA, 20 bp, Lactococcus raffinolactis
ttgtgtgcattggaaactgt

SEQ ID NO: 38620 - DNA, 20 bp, Actinomyces naeslundii
tgggaaagattgcgcctttt

SEQ ID NO: 38621 - DNA, 20 bp, Haemophilus influenzae
ttaactctggcgcccgtagc

SEQ ID NO: 38622 - DNA, 20 bp, Bacteroides distasonis
agctgtttgcgatacacagt

SEQ ID NO: 38623 - DNA, 20 bp, Propionibacterium granulosum
ccactgttgccagcaattcg

SEQ ID NO: 38624 - DNA, 20 bp, Bacteroides forsythus
agtttgtcgcttaacgataa

SEQ ID NO: 38625 - DNA, 20 bp, Actinomyces bovis
gggcttaaccccgtgatgcc

SEQ ID NO: 38626 - DNA, 20 bp, Streptococcus porcinus
tcatctacttaaaaggggca

SEQ ID NO: 38627 - DNA, 20 bp, Leptotrichia buccalis
gcatctaggcggccagacaa

SEQ ID NO: 38628 - DNA, 20 bp, Veillonella atypica
cacgtactacaatgggagtt

SEQ ID NO: 38629 - DNA, 20 bp, Bacillus oleronius
ctccctagagatagggattt

SEQ ID NO: 38630 - DNA, 20 bp, Suttonella indologenes
cagccttctggggcaatact

SEQ ID NO: 38631 - DNA, 20 bp, Bacteroides thetaiotaomicron
gtaggtggacagttaagtca

SEQ ID NO: 38632 - DNA, 20 bp, Campylobacter sputorum
aagtcctagcttgctaggat

SEQ ID NO: 38633 - DNA, 20 bp, Cardiobacterium hominis
tgcatttgaaactgggcgac

SEQ ID NO: 38634 - DNA, 20 bp, Clostridium clostridiiforme
ccgaaggcggggcaggtaac

SEQ ID NO: 38635 - DNA, 20 bp, Bacteroides ovatus
tggaaacagtatagccgtaa

SEQ ID NO: 38636 - DNA, 20 bp, Paenibacillus pabuli
aagagaactggaaagacgga

SEQ ID NO: 38637 - DNA, 20 bp, Leuconostoc lactis
taccgcataaaacctaacac

SEQ ID NO: 38638 - DNA, 20 bp, Tetragenococcus halophilus
cccccagctcaactggggag

SEQ ID NO: 38639 - DNA, 20 bp, Bacteroides fragilis
ggactggtaagtcagttgtg

SEQ ID NO: 38640 - DNA, 20 bp, Leuconostoc lactis
gatcaggtagtgacggtatc

SEQ ID NO: 38641 - DNA, 20 bp, Shewanella algae
catttgtgggggataacagt

SEQ ID NO: 38642 - DNA, 20 bp, Fusobacterium varium
acagactgggacaacatttg

SEQ ID NO: 38643 - DNA, 20 bp, Bacteroides ovatus
cagttgaaactggcagtctt

SEQ ID NO: 38644 - DNA, 20 bp, Fusobacterium varium
gatgttttcgtgcctcttcg

SEQ ID NO: 38645 - DNA, 20 bp, Pseudoramibacter alactolyticus
acacccgaagcctgtgagag

SEQ ID NO: 38646 - DNA, 20 bp, Weissella paramesenteroides
cgctaatctcttaaagtatg

SEQ ID NO: 38647 - DNA, 20 bp, Campylobacter lari
agagagcttgctcttttaat

SEQ ID NO: 38648 - DNA, 20 bp, Bacillus sp
gttccacatgcgtcaccccc

SEQ ID NO: 38649 - DNA, 20 bp, Kocuria kristinae
tgagtgacctgcctttgact

SEQ ID NO: 38650 - DNA, 20 bp, Atopobium parvulum
cactaggtgtgggggagtat

SEQ ID NO: 38651 - DNA, 20 bp, Leuconostoc lactis
aggtagtgacggtatccaac

SEQ ID NO: 38652 - DNA, 20 bp, Staphylococcus sp.
tgcatagttacttacacgta

SEQ ID NO: 38653 - DNA, 20 bp, Prevotella loescheii
gggcttgaactgcggcggaa

SEQ ID NO: 38654 - DNA, 20 bp, Leuconostoc pseudomesenteroides
tgaaacttagtgtcgcatga

SEQ ID NO: 38655 - DNA, 20 bp, Campylobacter sputorum
tctcttgtgaaatctagtag

SEQ ID NO: 38656 - DNA, 20 bp, Arcanobacterium haemolyticum
ctccggggctgcagtgggta

SEQ ID NO: 38657 - DNA, 20 bp, Moraxella osloensis
attaagtcacatgtgaaatc

SEQ ID NO: 38658 - DNA, 20 bp, Gemella haemolysans
gtttttctggtgcttgcacc

SEQ ID NO: 38659 - DNA, 20 bp, Campylobacter rectus
tgcttcgctagtcgaggcag

SEQ ID NO: 38660 - DNA, 20 bp, Prevotella disiens
ggtgttagcggctaagcgaa

SEQ ID NO: 38661 - DNA, 20 bp, Brevibacterium casei
aagctggtgtacaggtggtg

SEQ ID NO: 38662 - DNA, 20 bp, Streptococcus sp.
aattgattattgcatgataa

SEQ ID NO: 38663 - DNA, 20 bp, Actinomyces naeslundii
tcgcatggtgggcctgggaa

SEQ ID NO: 38664 - DNA, 20 bp, Bacteroides uniformis
agacatgtcagccgcaaggc

SEQ ID NO: 38665 - DNA, 20 bp, Helcococcus kunzii
aagtctgaatttaaaggctg

SEQ ID NO: 38666 - DNA, 20 bp, Bordetella avium
tgcgcaaatgacggtacctg

SEQ ID NO: 38667 - DNA, 20 bp, Vibrio hollisae
gggagtggaatccgccagaa

SEQ ID NO: 38668 - DNA, 20 bp, Gemella haemolysans
gtttttctggtgcttgcact

SEQ ID NO: 38669 - DNA, 20 bp, Kingella denitrificans
ttgttgacggtacctaaaga

SEQ ID NO: 38670 - DNA, 20 bp, Actinomyces naeslundii
ggataaccgcatgaaagtgt

SEQ ID NO: 38671 - DNA, 20 bp, Bacillus schlegellii
gggttgtaaacccctgttgt

SEQ ID NO: 38672 - DNA, 20 bp, Aerococcus viridans
catggaagaagattgaaaga

SEQ ID NO: 38673 - DNA, 20 bp, Bacteroides ovatus
tagcgtgaaggatgaaggct

SEQ ID NO: 38674 - DNA, 20 bp, Pasteurella multocida
attgggctatatgcttggtg

SEQ ID NO: 38675 - DNA, 20 bp, Bacillus pallidus
cctgccctgcagactgggat

SEQ ID NO: 38676 - DNA, 20 bp, Arcanobacterium haemolyticum
gcgaaagttgagggtaggtg

SEQ ID NO: 38677 - DNA, 20 bp, Facklamia ignava
ggaacgcgccgagaagggaa

SEQ ID NO: 38678 - DNA, 20 bp, Prevotella oris
gaacgattcagagatgatga

SEQ ID NO: 38679 - DNA, 20 bp, Streptococcus porcinus
catctacttaaaaggggcaa

SEQ ID NO: 38680 - DNA, 20 bp, Dolosicoccus paucivorans
agcttagagataagtgaaat

SEQ ID NO: 38681 - DNA, 20 bp, Campylobacter lari
ttaacacaagttgagtaggg

SEQ ID NO: 38682 - DNA, 20 bp, Weeksella virosa
ggacaatgggttagcgcctg

SEQ ID NO: 38683 - DNA, 20 bp, Pasteurella multocida
gtgcgagcttgagcgaatct

SEQ ID NO: 38684 - DNA, 20 bp, Corynebacterium glucuronolyticum
taatccaggggcttaacttt

SEQ ID NO: 38685 - DNA, 20 bp, Clostridium limosum
aggtgtcggggtttcaatac

SEQ ID NO: 38686 - DNA, 20 bp, Bacteroides uniformis
cccgatggcatagttcttcc

SEQ ID NO: 38687 - DNA, 20 bp, Staphylococcus sp.
atagttacttacacgtatgt

SEQ ID NO: 38688 - DNA, 20 bp, Clostridium botulinum
ttcttatcaaagatttattg

SEQ ID NO: 38689 - DNA, 20 bp, Peptostreptococcus anaerobius
caaggaggaagtcgtcgaag

SEQ ID NO: 38690 - DNA, 20 bp, Moraxella osloensis
cagcttcctggcataatatt

SEQ ID NO: 38691 - DNA, 20 bp, Haemophilus influenzae
gtattgaggaaggttgatgt

SEQ ID NO: 38692 - DNA, 20 bp, Acinetobacter johnsonii
aaggtagcttgctacctaac

SEQ ID NO: 38693 - DNA, 20 bp, Paenibacillus amylolyticus
taccggagtgacggtacctg

SEQ ID NO: 38694 - DNA, 20 bp, Leuconostoc pseudomesenteroides
catgacacaaagttaaaagg

SEQ ID NO: 38695 - DNA, 20 bp, Staphylococcus capitis
ggcttgacatatacaagaca

SEQ ID NO: 38696 - DNA, 20 bp, Micromonas micros
cgtgagcaacctaccttaca

SEQ ID NO: 38697 - DNA, 20 bp, Bacillus coagulans
aggaaaaaggaaaggcggct

SEQ ID NO: 38698 - DNA, 20 bp, Alloiococcus otitis
tgcaagcctgatggagcaat

SEQ ID NO: 38699 - DNA, 20 bp, Bacillus sp
gacgcatgtggaacgagcgg

SEQ ID NO: 38700 - DNA, 20 bp, Clostridium clostridiiforme
aggtgttggggggcaaagcc

SEQ ID NO: 38701 - DNA, 20 bp, Alicyclobacillus acidocaldarius
taccgtctcgcatggggctt

SEQ ID NO: 38702 - DNA, 20 bp, Dietzia maris
catgcatgtgttgtggtgga

SEQ ID NO: 38703 - DNA, 20 bp, Empedobacter brevis
aggtaccagaagaataagca

SEQ ID NO: 38704 - DNA, 20 bp, Vibrio hollisae
cagccgtgaggaaggtagcg

SEQ ID NO: 38705 - DNA, 20 bp, Aerococcus viridans
cattctggtctgttactgac

SEQ ID NO: 38706 - DNA, 20 bp, Moraxella bovis
gcttgctagatatgattagt

SEQ ID NO: 38707 - DNA, 20 bp, Comamonas testosteroni
cgggccttgtgctactagag

SEQ ID NO: 38708 - DNA, 20 bp, Enterococcus cecorum
agccaatctcttaaagctct

SEQ ID NO: 38709 - DNA, 20 bp, Dietzia maris
cgtttgtgaaaacccggggc

SEQ ID NO: 38710 - DNA, 20 bp, Corynebacterium jeikeium
tttacgattcccgtgccgta

SEQ ID NO: 38711 - DNA, 20 bp, Propionibacterium freudenreichii
tccaatgttgccagcagttc

SEQ ID NO: 38712 - DNA, 20 bp, Citrobacter sedlakii
gacatccacggaagactgca

SEQ ID NO: 38713 - DNA, 20 bp, Bacillus coagulans
gacctccctggagacagggc

SEQ ID NO: 38714 - DNA, 20 bp, Paenibacillus amylolyticus
tgaggtgcttgcacctctga

SEQ ID NO: 38715 - DNA, 20 bp, Streptococcus porcinus
cctagagataggctttctct

SEQ ID NO: 38716 - DNA, 20 bp, Leptotrichia buccalis
agaggtggacggaactgcac

SEQ ID NO: 38717 - DNA, 20 bp, Pasteurella multocida
ggatgttgttaaatagatag

SEQ ID NO: 38718 - DNA, 20 bp, Campylobacter rectus
tatgacggtacccaaggaat

SEQ ID NO: 38719 - DNA, 20 bp, Neisseria lactamica
cctgactgcttggtagcgaa

SEQ ID NO: 38720 - DNA, 20 bp, Gemella sanguinis
tagtaactatatacagtaga

SEQ ID NO: 38721 - DNA, 20 bp, Actinomyces bovis
gcttatggcgcattagttag

SEQ ID NO: 38722 - DNA, 20 bp, Corynebacterium glucuronolyticum
tgaggtggagctaatcgcga

SEQ ID NO: 38723 - DNA, 20 bp, Alcaligenes faecalis
aactagctgttggggccgtt

SEQ ID NO: 38724 - DNA, 20 bp, Methylobacterium mesophilicum
cggtggcgcgcacacaggtg

SEQ ID NO: 38725 - DNA, 20 bp, Bacteroides forsythus
cgataaaattgccgttgaaa

SEQ ID NO: 38726 - DNA, 20 bp, Actinomyces bovis
aagtttatggttaaagttcg

SEQ ID NO: 38727 - DNA, 20 bp, Propionibacterium freudenreichii
gaactctcggtggagcggtg

SEQ ID NO: 38728 - DNA, 20 bp, Fusobacterium mortiferum
gtcagaggtgaaagcgctta

SEQ ID NO: 38729 - DNA, 20 bp, Gemella morbillorum
cttgcactagaaaaacttag

SEQ ID NO: 38730 - DNA, 20 bp, Comamonas testosteroni
gccttgtgctactagagcgg

SEQ ID NO: 38731 - DNA, 20 bp, Acinetobacter haemolyticus
gtcgagcggggaagtgtagc

SEQ ID NO: 38732 - DNA, 20 bp, Weeksella virosa
acggggactctaatgagact

SEQ ID NO: 38733 - DNA, 20 bp, Facklamia sourekii
ctagaggatggtcccgcggt

SEQ ID NO: 38734 - DNA, 20 bp, Clostridium limosum
ggtgtcggggtttcaatact

SEQ ID NO: 38735 - DNA, 20 bp, Staphylococcus succinus
atagaaccatgcggttctat

SEQ ID NO: 38736 - DNA, 20 bp, Veillonella atypica
aaacccgagaaacactctct

SEQ ID NO: 38737 - DNA, 20 bp, Gemella bergeri
ttgttagggaagaaaggttg

SEQ ID NO: 38738 - DNA, 20 bp, Campylobacter rectus
ttctttacataagttaagtc

SEQ ID NO: 38739 - DNA, 20 bp, Empedobacter brevis
acttttatctggggataaac

SEQ ID NO: 38740 - DNA, 20 bp, Staphylococcus pulvereri
gctaatacctgataatattt

SEQ ID NO: 38741 - DNA, 20 bp, Pseudoramibacter alactolyticus
tcgcatggcaagatcatgaa

SEQ ID NO: 38742 - DNA, 20 bp, Acinetobacter baumannii
gctactggacctagcggcgg

SEQ ID NO: 38743 - DNA, 20 bp, Clostridium histolyticum
ccgagaatcctgtggaaaca

SEQ ID NO: 38744 - DNA, 20 bp, Anaerococcus prevotii
gagcgatgaaatcttgacag

SEQ ID NO: 38745 - DNA, 20 bp, Moraxella osloensis
gtaggtggctcattaagtca

SEQ ID NO: 38746 - DNA, 20 bp, Nocardia asteroides
ttgctacctcgcgagaggat

SEQ ID NO: 38747 - DNA, 20 bp, Rhizobium radiobacter
acattcggggtttgggcagt

SEQ ID NO: 38748 - DNA, 20 bp, Eggerthella lenta
acggcaagggatggggtcgc

SEQ ID NO: 38749 - DNA, 20 bp, Bacteroides thetaiotaomicron
gaataaagttttccacgtgt

SEQ ID NO: 38750 - DNA, 20 bp, Bacteroides distasonis
aagtccgtaaccgaaaggat

SEQ ID NO: 38751 - DNA, 20 bp, Gemella bergeri
cgaaagggaggagccggtca

SEQ ID NO: 38752 - DNA, 20 bp, Alicyclobacillus acidocaldarius
ctcctctctcagcggcccaa

SEQ ID NO: 38753 - DNA, 20 bp, Facklamia ignava
tacagcgagaagcgacgtcg

SEQ ID NO: 38754 - DNA, 20 bp, Anaerococcus tetradius
atgacagtaccatacgaata

SEQ ID NO: 38755 - DNA, 20 bp, Fusobacterium mortiferum
gaaagcgcttagctcaacta

SEQ ID NO: 38756 - DNA, 20 bp, Leptotrichia buccalis
ggcatgaagagtgtccgtgc

SEQ ID NO: 38757 - DNA, 20 bp, Morganella morganii
ggcttaacccgggaattgca

SEQ ID NO: 38758 - DNA, 20 bp, Streptococcus agalactiae
gttagttatttaaaaggagc

SEQ ID NO: 38759 - DNA, 20 bp, Pasteurella multocida
gatagcatcattgacgttaa

SEQ ID NO: 38760 - DNA, 20 bp, Prevotella denticola
aaccacaagggacactacat

SEQ ID NO: 38761 - DNA, 20 bp, Acinetobacter genospecies 3
gcctaactgcaaagagggcg

SEQ ID NO: 38762 - DNA, 20 bp, Actinomyces odontolyticus
gcggcactgcagagatgtgg

SEQ ID NO: 38763 - DNA, 20 bp, Helcococcus kunzii
gatttcttcggaatgaaacc

SEQ ID NO: 38764 - DNA, 20 bp, Brevibacterium epidermidis
tctttggagctggtgtacag

SEQ ID NO: 38765 - DNA, 20 bp, Pasteurella trehalosi
ggtgttttgtttaatagaca

SEQ ID NO: 38766 - DNA, 20 bp, Bacillus smithii
cggcgcaagctgccgcttgc

SEQ ID NO: 38767 - DNA, 20 bp, Prevotella intermedia
ttgcacattctggacgtcga

SEQ ID NO: 38768 - DNA, 20 bp, Helcococcus kunzii
gatttcttcggaatgaaacg

SEQ ID NO: 38769 - DNA, 20 bp, Gemella haemolysans
tttgctaacactatgagatg

SEQ ID NO: 38770 - DNA, 20 bp, Streptococcus suis
gagtggaaagtttctcactt

SEQ ID NO: 38771 - DNA, 20 bp, Corynebacterium urealyticum
ggggatttttcacgatttcc

SEQ ID NO: 38772 - DNA, 20 bp, Clostridium paraputrificum
gcttcgcatgaagtagcaat

SEQ ID NO: 38773 - DNA, 20 bp, Brochothrix campestris
aagtgaaagacggtttcggc

SEQ ID NO: 38774 - DNA, 20 bp, Corynebacterium coyleae
ataggaccacattttggatg

SEQ ID NO: 38775 - DNA, 20 bp, Bacteroides uniformis
gatagttaccatcaggttat

SEQ ID NO: 38776 - DNA, 20 bp, Brevibacterium epidermidis
cccaacccttttgggagggg

SEQ ID NO: 38777 - DNA, 20 bp, Neisseria meningitidis
gaatagcgcaaggcccaaag

SEQ ID NO: 38778 - DNA, 20 bp, Tetragenococcus halophilus
catgacggtagctgaccaga

SEQ ID NO: 38779 - DNA, 20 bp, Bacillus lentus
aacaaaaagcaagcttctta

SEQ ID NO: 38780 - DNA, 20 bp, Facklamia ignava
gcgcaaacgcaataaacact

SEQ ID NO: 38781 - DNA, 20 bp, Proteus vulgaris
ggggaggaaggtgataaagt

SEQ ID NO: 38782 - DNA, 20 bp, Helcococcus ovis
cggaaacttgtatacaggtg

SEQ ID NO: 38783 - DNA, 20 bp, Methylobacterium mesophilicum
cttgctgccggaggatcggc

SEQ ID NO: 38784 - DNA, 20 bp, Acinetobacter genospecies 3
caaagagggcggttaccacg

SEQ ID NO: 38785 - DNA, 20 bp, Facklamia sourekii
ttctcttgacgtgagtggcg

SEQ ID NO: 38786 - DNA, 20 bp, Rothia mucilaginosa
cagggaagaagagagattga

SEQ ID NO: 38787 - DNA, 20 bp, Streptococcus thoraltensis
ttaccaaggcttcgatacat

SEQ ID NO: 38788 - DNA, 20 bp, Brochothrix campestris
aaagccggtttggtaacctt

SEQ ID NO: 38789 - DNA, 20 bp, Campylobacter rectus
aacggagattaagtagcttg

SEQ ID NO: 38790 - DNA, 20 bp, Acinetobacter haemolyticus
tactctagttaatacctaga

SEQ ID NO: 38791 - DNA, 20 bp, Helcococcus ovis
ttgtcgggagtcaaatctcg

SEQ ID NO: 38792 - DNA, 20 bp, Pseudoramibacter alactolyticus
gagagaaccgcaaggactca

SEQ ID NO: 38793 - DNA, 20 bp, Mannheimia haemolytica
attggggtttaactctggtg

SEQ ID NO: 38794 - DNA, 20 bp, Peptoniphilus indolicus
gacagtattacaggtggtgc

SEQ ID NO: 38795 - DNA, 20 bp, Clostridium ramosum
gatctggcctgcaactgacg

SEQ ID NO: 38796 - DNA, 20 bp, Streptococcus hyovaginalis
ataagcgaagaacgggagta

SEQ ID NO: 38797 - DNA, 20 bp, Aneurinibacillus thermoaerophilus
gacctcccggtctgacggta

SEQ ID NO: 38798 - DNA, 20 bp, Neisseria meningitidis
agccgctgatattagcaaca

SEQ ID NO: 38799 - DNA, 20 bp, Actinomyces radingae
atgggtgctaatactggatg

SEQ ID NO: 38800 - DNA, 20 bp, Leptotrichia buccalis
gctagagtgctggagaggtg

SEQ ID NO: 38801 - DNA, 20 bp, Tetragenococcus halophilus
ggcaacccttaggggagcca

SEQ ID NO: 38802 - DNA, 20 bp, Lactococcus lactis
aaacataagttttaagtttg

SEQ ID NO: 38803 - DNA, 20 bp, Aneurinibacillus aneurinilyticus
agagaaagacctttggtcac

SEQ ID NO: 38804 - DNA, 20 bp, Aneurinibacillus thermoaerophilus
gggaagaaccgccgggatga

SEQ ID NO: 38805 - DNA, 20 bp, Haemophilus haemolyticus
cgcgtagtgtcgagagacga

SEQ ID NO: 38806 - DNA, 20 bp, Bacteroides thetaiotaomicron
aggcagctcactggactgca

SEQ ID NO: 38807 - DNA, 20 bp, Leptotrichia buccalis
attcgtagatatgtgcagga

SEQ ID NO: 38808 - DNA, 20 bp, Prevotella oralis
gctcaaccggtgatgtgcag

SEQ ID NO: 38809 - DNA, 20 bp, Weeksella virosa
tttttcttcggacagaatgc

SEQ ID NO: 38810 - DNA, 20 bp, Acinetobacter genospecies 3
aagtagctagcctaactgca

SEQ ID NO: 38811 - DNA, 20 bp, Prevotella melaninogenica
taggccggagattaagtgtg

SEQ ID NO: 38812 - DNA, 20 bp, Corynebacterium glucuronolyticum
gaagtttttttgacggtacc

SEQ ID NO: 38813 - DNA, 20 bp, Eubacterium moniliforme
gcttaacctgagtgctgcat

SEQ ID NO: 38814 - DNA, 20 bp, Corynebacterium auris
tcgtttgtgtaagtccatgg

SEQ ID NO: 38815 - DNA, 20 bp, Kingella denitrificans
ttagggaagaaaagggaagt

SEQ ID NO: 38816 - DNA, 20 bp, Campylobacter coli
gttgctctgctagtcagggc

SEQ ID NO: 38817 - DNA, 20 bp, Streptococcus infantarius
atcccgatgccattcctaga

SEQ ID NO: 38818 - DNA, 20 bp, Bacteroides ovatus
aacagtatagccgtaaggct

SEQ ID NO: 38819 - DNA, 20 bp, Streptococcus porcinus
aataccgcatgaaagtagaa

SEQ ID NO: 38820 - DNA, 20 bp, Bacillus cereus
agagcttgctctcaagaagt

SEQ ID NO: 38821 - DNA, 20 bp, Corynebacterium accolens
agtagatgttgcatgacatt

SEQ ID NO: 38822 - DNA, 20 bp, Dermabacter hominis
ctttatgcggggagtcgtcg

SEQ ID NO: 38823 - DNA, 20 bp, Streptococcus hyovaginalis
caccattaatcatgagtcgc

SEQ ID NO: 38824 - DNA, 20 bp, Tetragenococcus halophilus
tttcacctgaaagaaagctc

SEQ ID NO: 38825 - DNA, 20 bp, Actinomyces neuii
gcctgcggaaaaggcagggt

SEQ ID NO: 38826 - DNA, 20 bp, Actinomyces bovis
agcagcgatgcggagcgaat

SEQ ID NO: 38827 - DNA, 20 bp, Moraxella osloensis
gcataatattgacactgaga

SEQ ID NO: 38828 - DNA, 20 bp, Clostridium butyricum
tacaatgagatgcaacctcg

SEQ ID NO: 38829 - DNA, 20 bp, Pseudoramibacter alactolyticus
acgagaaggttttgaatgat

SEQ ID NO: 38830 - DNA, 20 bp, Ochrobactrum intermedium
atgtgcccgaaaggggaaag

SEQ ID NO: 38831 - DNA, 20 bp, Leptotrichia buccalis
ccctggaaactgtttggcta

SEQ ID NO: 38832 - DNA, 20 bp, Facklamia ignava
agttgttccagtcgcatgac

SEQ ID NO: 38833 - DNA, 20 bp, Corynebacterium xerosis
cgcaccgtgagggtgtggtg

SEQ ID NO: 38834 - DNA, 20 bp, Enterococcus saccharolyticus
aataccgcataatgcttttt

SEQ ID NO: 38835 - DNA, 20 bp, Arcanobacterium bernardiae
gagtgtggtaggggtaattg

SEQ ID NO: 38836 - DNA, 20 bp, Weissella paramesenteroides
tggttgttggttgaaagatg

SEQ ID NO: 38837 - DNA, 20 bp, Haemophilus actinemycetemcomitans
gtttgtgccttagggagctt

SEQ ID NO: 38838 - DNA, 20 bp, Facklamia ignava
tgttccagtcgcatgactgg

SEQ ID NO: 38839 - DNA, 20 bp, Photobacterium damselae
agtcgagcggcagcgactta

SEQ ID NO: 38840 - DNA, 20 bp, Atopobium parvulum
acttgagtttggtaggggaa

SEQ ID NO: 38841 - DNA, 20 bp, Bacteroides uniformis
gctacacggcgacgtgatgc

SEQ ID NO: 38842 - DNA, 20 bp, Bacteroides thetaiotaomicron
caggcctgaaccagccaagt

SEQ ID NO: 38843 - DNA, 20 bp, Cardiobacterium hominis
aggcggttgcccaagtcaga

SEQ ID NO: 38844 - DNA, 20 bp, Lactococcus lactis
tggtgagagtggaaagctca

SEQ ID NO: 38845 - DNA, 20 bp, Paenibacillus glucanolyticus
tgataatgaaagacggagca

SEQ ID NO: 38846 - DNA, 20 bp, Streptococcus thoraltensis
gctctgttataagcgaagaa

SEQ ID NO: 38847 - DNA, 20 bp, Delftia acidovorans
gaacgaaaaagcttctccta

SEQ ID NO: 38848 - DNA, 20 bp, Prevotella disiens
tagatgctcaacatctgact

SEQ ID NO: 38849 - DNA, 20 bp, Bacteroides fragilis
cttttatataagaataaagt

SEQ ID NO: 38850 - DNA, 20 bp, Cardiobacterium hominis
cgaacggaaacgatggagct

SEQ ID NO: 38851 - DNA, 20 bp, Cardiobacterium hominis
gtcgaacggaaacgatggag

SEQ ID NO: 38852 - DNA, 20 bp, Granulicatella adiacens
agcttctgctgatggatgga

SEQ ID NO: 38853 - DNA, 20 bp, Dermabacter hominis
ctgtgcttgcacagtggatt

SEQ ID NO: 38854 - DNA, 20 bp, Pediococcus pentosaceus
ccgtataacagagaaaaccg

SEQ ID NO: 38855 - DNA, 20 bp, Microbacterium hominis
agtagctggaaagatttttt

SEQ ID NO: 38856 - DNA, 20 bp, Actinomyces turicensis
ccgcagctttgggttgtggt

SEQ ID NO: 38857 - DNA, 20 bp, Brevundimonas diminuta
gcctggaccgccacggagac

SEQ ID NO: 38858 - DNA, 20 bp, Neisseria meningitidis
cttgagagagaaagcagggg

SEQ ID NO: 38859 - DNA, 20 bp, Actinomyces naeslundii
atattctgggtctgtcgcat

SEQ ID NO: 38860 - DNA, 20 bp, Paenibacillus apiarius
ggctcaaccttgggtcgcat

SEQ ID NO: 38861 - DNA, 20 bp, Pasteurella trehalosi
acaaagcaattgacgttagt

SEQ ID NO: 38862 - DNA, 20 bp, Bacillus sp
agagagattgaaagatggct

SEQ ID NO: 38863 - DNA, 20 bp, Streptococcus suis
accgcataacagtatttacc

SEQ ID NO: 38864 - DNA, 20 bp, Plesiomonas shigelloides
ccaaagtgggggctcttcgg

SEQ ID NO: 38865 - DNA, 20 bp, Campylobacter lari
acactggaggacaacagtta

SEQ ID NO: 38866 - DNA, 20 bp, Geobacillus thermoglucosidasius
caagtcgagcggaccgggcg

SEQ ID NO: 38867 - DNA, 20 bp, Bacteroides forsythus
gtaccattaggtagttggtg

SEQ ID NO: 38868 - DNA, 20 bp, Alicyclobacillus acidocaldarius
cgagcaacagagctttacaa

SEQ ID NO: 38869 - DNA, 20 bp, Corynebacterium group F
gctaccttgtgaggggatgc

SEQ ID NO: 38870 - DNA, 20 bp, Propionibacterium avidum
gttggaaagcttcggcggtt

SEQ ID NO: 38871 - DNA, 20 bp, Shewanella algae
gtgtaagttaataccttaca

SEQ ID NO: 38872 - DNA, 20 bp, Prevotella melaninogenica
tagacgctcaacgtctgact

SEQ ID NO: 38873 - DNA, 20 bp, Bacteroides capilosus
atttatcgctctgagatggc

SEQ ID NO: 38874 - DNA, 20 bp, Anaerococcus prevotii
tcttcggaagcctcaataca

SEQ ID NO: 38875 - DNA, 20 bp, Atopobium parvulum
tgggatagccacgggaaacc

SEQ ID NO: 38876 - DNA, 20 bp, Acinetobacter calcoaceticus
gttaataccttcagatagtg

SEQ ID NO: 38877 - DNA, 20 bp, Photobacterium damselae
tcgagcggcagcgacttaac

SEQ ID NO: 38878 - DNA, 20 bp, Campylobacter curvus
atagctaatctgccccatag

SEQ ID NO: 38879 - DNA, 20 bp, Bacteroides forsythus
cctcataaaacaggggttcc

SEQ ID NO: 38880 - DNA, 20 bp, Corynebacterium macginleyi
agccggtggcctaaacgtgt

SEQ ID NO: 38881 - DNA, 20 bp, Tetragenococcus halophilus
cctgaaagaaagctcaaagg

SEQ ID NO: 38882 - DNA, 20 bp, Fusobacterium necrogenes
agttggcagagatgccttcg

SEQ ID NO: 38883 - DNA, 20 bp, Fusobacterium mortiferum
tatgcgctgcaggagagctt

SEQ ID NO: 38884 - DNA, 20 bp, Delftia acidovorans
cttctcctaatacgagaggc

SEQ ID NO: 38885 - DNA, 20 bp, Anaerococcus prevotii
aagggttcgcaggcggaaat

SEQ ID NO: 38886 - DNA, 20 bp, Bacteroides uniformis
acccgatggcatagttcttc

SEQ ID NO: 38887 - DNA, 20 bp, Brevibacillus choshinensis
tggaacaacgggcagccaac

SEQ ID NO: 38888 - DNA, 20 bp, Peptoniphilus indolicus
agcgggcaagctagcgatag

SEQ ID NO: 38889 - DNA, 20 bp, Propionibacterium acnes
agatgggtgtgcctcttttg

SEQ ID NO: 38890 - DNA, 20 bp, Brochothrix campestris
aatcgatgctaataccgaat

SEQ ID NO: 38891 - DNA, 20 bp, Propionibacterium freudenreichii
cgtgcccttgacttcggtat

SEQ ID NO: 38892 - DNA, 20 bp, Clostridium cadaveris
ggagccagcggcctaaggta

SEQ ID NO: 38893 - DNA, 20 bp, Bacteroides merdae
gtcaatggccgagaggctga

SEQ ID NO: 38894 - DNA, 20 bp, Facklamia ignava
gtgcattagctagacggtgg

SEQ ID NO: 38895 - DNA, 20 bp, Moraxella lacunata
ttaatacctacaagccctga

SEQ ID NO: 38896 - DNA, 20 bp, Streptococcus dysgalactiae
ctcctgaccggtctagagat

SEQ ID NO: 38897 - DNA, 20 bp, Streptococcus uberis
ggactggtgcttgcactggt

SEQ ID NO: 38898 - DNA, 20 bp, Paenibacillus amylolyticus
tcaaccttggttcgcactgg

SEQ ID NO: 38899 - DNA, 20 bp, Bacteroides uniformis
actgaatgatgtggagacat

SEQ ID NO: 38900 - DNA, 20 bp, Eggerthella lenta
agcctgctgggccgcaactg

SEQ ID NO: 38901 - DNA, 20 bp, Suttonella indologenes
attgcatttgaaactgggta

SEQ ID NO: 38902 - DNA, 20 bp, Weeksella virosa
caagccgagcggtagattat

SEQ ID NO: 38903 - DNA, 20 bp, Propionibacterium avidum
gatgggtatgcctccttgtg

SEQ ID NO: 38904 - DNA, 20 bp, Prevotella loescheii
cgtaccggaagtgcggtgga

SEQ ID NO: 38905 - DNA, 20 bp, Bacillus megaterium
gatgattgaaagatggtttc

SEQ ID NO: 38906 - DNA, 20 bp, Streptococcus anginosus
tcatactgtgacggtactta

SEQ ID NO: 38907 - DNA, 20 bp, Gemella haemolysans
ctatacacagtagagacggt

SEQ ID NO: 38908 - DNA, 20 bp, Streptococcus sp.
cataaaattgattattgcat

SEQ ID NO: 38909 - DNA, 20 bp, Methylobacterium mesophilicum
ggtgcttgcaccgcagtagc

SEQ ID NO: 38910 - DNA, 20 bp, Propionibacterium propionicus
acgtctagagataggcgccc

SEQ ID NO: 38911 - DNA, 20 bp, Paenibacillus azotofixans
actttagttgccagcaggtg

SEQ ID NO: 38912 - DNA, 20 bp, Prevotella oris
atgcggggataaagtgaggg

SEQ ID NO: 38913 - DNA, 20 bp, Streptococcus sp.
ataaaattgattattgcatg

SEQ ID NO: 38914 - DNA, 20 bp, Acinetobacter junii
tgagactaatactcttggat

SEQ ID NO: 38915 - DNA, 20 bp, Staphylococcus capitis
agagatacgtcctcccttgt

SEQ ID NO: 38916 - DNA, 20 bp, Bacteroides fragilis
attattaaaggattccggta

SEQ ID NO: 38917 - DNA, 20 bp, Bacillus sp
catggagagagattgaaaga

SEQ ID NO: 38918 - DNA, 20 bp, Listeria innocua
gctcttgaaagatggtttcg

SEQ ID NO: 38919 - DNA, 20 bp, Dolosigranulum pigrum
ggaaactgacagacttgaat

SEQ ID NO: 38920 - DNA, 20 bp, Streptococcus thoraltensis
gagtaagagtggaaagttta

SEQ ID NO: 38921 - DNA, 20 bp, Actinomyces neuii
ttgatggtagtgggtaaaga

SEQ ID NO: 38922 - DNA, 20 bp, Gemella morbillorum
gcgagagtcagccaacctca

SEQ ID NO: 38923 - DNA, 20 bp, Actinomyces naeslundii
ggggggccttttccgggtct

SEQ ID NO: 38924 - DNA, 20 bp, Clostridium butyricum
cacttcggtggcaggaagac

SEQ ID NO: 38925 - DNA, 20 bp, Peptoniphilus indolicus
acaaagagcgggcaagctag

SEQ ID NO: 38926 - DNA, 20 bp, Campylobacter concisus
agggttttactggttttgga

SEQ ID NO: 38927 - DNA, 20 bp, Bacillus smithii
gctaatcccaaaaaaccatt

SEQ ID NO: 38928 - DNA, 20 bp, Clostridium ramosum
cacttgtgctcgagtggcga

SEQ ID NO: 38929 - DNA, 20 bp, Corynebacterium ulcerans
cttgacatatacaagatcgg

SEQ ID NO: 38930 - DNA, 20 bp, Corynebacterium coyleae
cgtttgcgagcctgtgaggg

SEQ ID NO: 38931 - DNA, 20 bp, Fusobacterium mortiferum
tcctaagaaattagcagaga

SEQ ID NO: 38932 - DNA, 20 bp, Clostridium botulinum
atcaaagatttattgctttg

SEQ ID NO: 38933 - DNA, 20 bp, Gemella sanguinis
gaacctgcctcatagacggg

SEQ ID NO: 38934 - DNA, 20 bp, Campylobacter lari
gagtagggaaagtttttcgg

SEQ ID NO: 38935 - DNA, 20 bp, Campylobacter rectus
gaagaatacccattgcgaaa

SEQ ID NO: 38936 - DNA, 20 bp, Streptococcus constellatus
tactaccccgtattctgtga

SEQ ID NO: 38937 - DNA, 20 bp, Veillonella dispar
gattgacggtaccggaatag

SEQ ID NO: 38938 - DNA, 20 bp, Lactococcus lactis
tgcctttgagcgggggacaa

SEQ ID NO: 38939 - DNA, 20 bp, Acinetobacter junii
cggagatgaggtgcttgcac

SEQ ID NO: 38940 - DNA, 20 bp, Brevibacterium epidermidis
agtttttcgatcggggatgg

SEQ ID NO: 38941 - DNA, 20 bp, Leptotrichia buccalis
gatcttgacatcctacgaat

SEQ ID NO: 38942 - DNA, 20 bp, Helcococcus ovis
ttctgtccttagtgaagata

SEQ ID NO: 38943 - DNA, 20 bp, Clostridium clostridiiforme
ccttcggtgccgccgcaaac

SEQ ID NO: 38944 - DNA, 20 bp, Porphyromonas endodontalis
aggactctatcgagacagcc

SEQ ID NO: 38945 - DNA, 20 bp, Clostridium clostridiiforme
cagggccgcatggtctggtg

SEQ ID NO: 38946 - DNA, 20 bp, Microbacterium hominis
cgcatggtcagtagctggaa

SEQ ID NO: 38947 - DNA, 20 bp, Anaerococcus prevotii
ggcggtctaagatggactcg

SEQ ID NO: 38948 - DNA, 20 bp, Brevibacillus choshinensis
ggcttcggctgtcactggga

SEQ ID NO: 38949 - DNA, 20 bp, Helcococcus kunzii
tcgtgagagcaagcgaatcg

SEQ ID NO: 38950 - DNA, 20 bp, Escherichia fergusonii
agggcctaacacatgcaagt

SEQ ID NO: 38951 - DNA, 20 bp, Brevibacillus choshinensis
accctcctagagataggagc

SEQ ID NO: 38952 - DNA, 20 bp, Methylobacterium mesophilicum
gctgttggggtgcttgcacc

SEQ ID NO: 38953 - DNA, 20 bp, Paenibacillus peoriae
ggggttgtttagaagcttgc

SEQ ID NO: 38954 - DNA, 20 bp, Moraxella osloensis
tagcctaacgaaagagggcg

SEQ ID NO: 38955 - DNA, 20 bp, Chryseobacterium meningosepticum
aacctacttacgtgtaagta

SEQ ID NO: 38956 - DNA, 20 bp, Fusobacterium mortiferum
tgtgagtttcgcatgaaatt

SEQ ID NO: 38957 - DNA, 20 bp, Burkholderia gladioli
tgagggctaatatccttcgg

SEQ ID NO: 38958 - DNA, 20 bp, Brochothrix campestris
ggtaacctgcctcacagctg

SEQ ID NO: 38959 - DNA, 20 bp, Facklamia hominis
aacgaaggaaagacggcttc

SEQ ID NO: 38960 - DNA, 20 bp, Haemophilus segnis
cgaggaaggcatttagttta

SEQ ID NO: 38961 - DNA, 20 bp, Streptococcus thermophilus
gttgcgagtcggtgacggcg

SEQ ID NO: 38962 - DNA, 20 bp, Alcaligenes faecalis
tctggaaagccgaagagatt

SEQ ID NO: 38963 - DNA, 20 bp, Weissella paramesenteroides
ccaacaaccgcatggttgtt

SEQ ID NO: 38964 - DNA, 20 bp, Cardiobacterium hominis
gccttttgctgggggataac

SEQ ID NO: 38965 - DNA, 20 bp, Actinomyces bovis
ggaatgcttcttatatgacg

SEQ ID NO: 38966 - DNA, 20 bp, Brevibacillus brevis
gaggaaaagctgaaagtcgg

SEQ ID NO: 38967 - DNA, 20 bp, Prevotella melaninogenica
ggatgcccgctgttggtacc

SEQ ID NO: 38968 - DNA, 20 bp, Bacteroides thetaiotaomicron
cagctcactggactgcaact

SEQ ID NO: 38969 - DNA, 20 bp, Acinetobacter haemolyticus
ctctagttaatacctagaga

SEQ ID NO: 38970 - DNA, 20 bp, Bacteroides fragilis
aaacttcttttatataagaa

SEQ ID NO: 38971 - DNA, 20 bp, Eggerthella lenta
ggccggatcccgaactggga

SEQ ID NO: 38972 - DNA, 20 bp, Streptococcus infantarius
tttagcttgctaaagtttga

SEQ ID NO: 38973 - DNA, 20 bp, Streptococcus suis
tttttcttcggaacactggt

SEQ ID NO: 38974 - DNA, 20 bp, Granulicatella adiacens
ttctgctgatggatggaccc

SEQ ID NO: 38975 - DNA, 20 bp, Chryseobacterium meningosepticum
taggatgcaaatctcgaaag

SEQ ID NO: 38976 - DNA, 20 bp, Peptostreptococcus anaerobius
gtgtttaatcacaccttccc

SEQ ID NO: 38977 - DNA, 20 bp, Bacillus sp
ataacttttctctccgcatg

SEQ ID NO: 38978 - DNA, 20 bp, Arcanobacterium bernardiae
gcgatgtgccagagatggtg

SEQ ID NO: 38979 - DNA, 20 bp, Citrobacter amalonaticus
attttcattgacgttacccg

SEQ ID NO: 38980 - DNA, 20 bp, Lactococcus lactis
tggatgagcagcgaacgggt

SEQ ID NO: 38981 - DNA, 20 bp, Dietzia maris
aaccgtagagatacggtccc

SEQ ID NO: 38982 - DNA, 20 bp, Oligella ureolytica
aataccttaagatgctgacg

SEQ ID NO: 38983 - DNA, 20 bp, Paenibacillus macerans
tcgagcggacctgatggagt

SEQ ID NO: 38984 - DNA, 20 bp, Bacteroides thetaiotaomicron
taaattgcatttgaatattt

SEQ ID NO: 38985 - DNA, 20 bp, Stenotrophomonas maltophilia
ctgggcgactagaatgtggt

SEQ ID NO: 38986 - DNA, 20 bp, Peptostreptococcus anaerobius
aagtcggtggttaaaggcta

SEQ ID NO: 38987 - DNA, 20 bp, Propionibacterium avidum
ggcctaacctgtgtgggggt

SEQ ID NO: 38988 - DNA, 20 bp, Actinomyces bovis
tatatgacggtaccttacca

SEQ ID NO: 38989 - DNA, 20 bp, Campylobacter gracilis
acatcctctgacccctctag

SEQ ID NO: 38990 - DNA, 20 bp, Bacteroides distasonis
ccaaaccacgtctcagttcg

SEQ ID NO: 38991 - DNA, 20 bp, Fusobacterium varium
tgacatcccaagaagttaac

SEQ ID NO: 38992 - DNA, 20 bp, Bacillus megaterium
catgggagatgattgaaaga

SEQ ID NO: 38993 - DNA, 20 bp, Fusobacterium varium
gcgcgtctaggcggtttagt

SEQ ID NO: 38994 - DNA, 20 bp, Streptococcus thoraltensis
gagttgcgagctggtgacag

SEQ ID NO: 38995 - DNA, 20 bp, Anaerococcus prevotii
aaaccgggattaataccaaa

SEQ ID NO: 38996 - DNA, 20 bp, Clostridium ramosum
cttaacttcagtaagccata

SEQ ID NO: 38997 - DNA, 20 bp, Clostridium ramosum
ttaacttcagtaagccatag

SEQ ID NO: 38998 - DNA, 20 bp, Haemophilus haemolyticus
tatacagagggtggcgaaac

SEQ ID NO: 38999 - DNA, 20 bp, Leuconostoc lactis
gaagaatgtatctgatagta

SEQ ID NO: 39000 - DNA, 20 bp, Veillonella dispar
cgaaaggccttcttgcgaat

SEQ ID NO: 39001 - DNA, 20 bp, Streptococcus gallolyticus
tgttagagacttgaaagatg

SEQ ID NO: 39002 - DNA, 20 bp, Streptococcus thermophilus
accgagcggatgagttgcga

SEQ ID NO: 39003 - DNA, 20 bp, Bacillus pumilus
ttccttgaaccgcatggttc

SEQ ID NO: 39004 - DNA, 20 bp, Achromobacter xylosoxidans
accccgcggaactgacggta

SEQ ID NO: 39005 - DNA, 20 bp, Actinomyces meyeri
gccgcaactgtgggttgtgg

SEQ ID NO: 39006 - DNA, 20 bp, Peptoniphilus indolicus
aaagagcgggcaagctagcg

SEQ ID NO: 39007 - DNA, 20 bp, Streptococcus pneumoniae
gactctagagatagagtttt

SEQ ID NO: 39008 - DNA, 20 bp, Gemella haemolysans
caccggaaaaacttagcggc

SEQ ID NO: 39009 - DNA, 20 bp, Facklamia sourekii
aacttgtttctcttgacgtg

SEQ ID NO: 39010 - DNA, 20 bp, Anaerococcus prevotii
caggtgtaaaaggcagtagc

SEQ ID NO: 39011 - DNA, 20 bp, Oligella urethralis
ccccactaccgggcacgttc

SEQ ID NO: 39012 - DNA, 20 bp, Alcaligenes faecalis
cccttgacatgtctggaaag

SEQ ID NO: 39013 - DNA, 20 bp, Enterobacter gergoviae
gggaggaagggagtgaggtt

SEQ ID NO: 39014 - DNA, 20 bp, Haemophilus influenzae
ggtattgaggaaggttgatg

SEQ ID NO: 39015 - DNA, 20 bp, Proteus vulgaris
gggctaataccgcatgacgt

SEQ ID NO: 39016 - DNA, 20 bp, Facklamia ignava
tgtcactgaaggatggtccc

SEQ ID NO: 39017 - DNA, 20 bp, Propionibacterium acnes
aagtcggtacaaggtagccc

SEQ ID NO: 39018 - DNA, 20 bp, Facklamia ignava
gggagcgcaggcggttgatt

SEQ ID NO: 39019 - DNA, 20 bp, Corynebacterium glucuronolyticum
tggctggtacagtgcgtgtg

SEQ ID NO: 39020 - DNA, 20 bp, Pediococcus inopinatus
taactataaagtgagtggcg

SEQ ID NO: 39021 - DNA, 20 bp, Prevotella oris
aaagggagcgtaggccgtgg

SEQ ID NO: 39022 - DNA, 20 bp, Tetragenococcus halophilus
gaatctctgaaagcttctct

SEQ ID NO: 39023 - DNA, 20 bp, Facklamia languida
gaactcgcaagggcaagcga

SEQ ID NO: 39024 - DNA, 20 bp, Streptococcus gordonii
taattattgcatgataatta

SEQ ID NO: 39025 - DNA, 20 bp, Moraxella lacunata
tcttgaagacttagtgacgc

SEQ ID NO: 39026 - DNA, 20 bp, Sporosarcina pasteurii
ctctgaaagacggcttcggc

SEQ ID NO: 39027 - DNA, 20 bp, Gemella bergeri
ggaggagccggtcacggtgg

SEQ ID NO: 39028 - DNA, 20 bp, Bacteroides uniformis
acacggcgacgtgatgctaa

SEQ ID NO: 39029 - DNA, 20 bp, Alcaligenes faecalis
gccgtgctcgcaagagaacc

SEQ ID NO: 39030 - DNA, 20 bp, Enterobacter cloacae
aaggcgacagggttaataac

SEQ ID NO: 39031 - DNA, 20 bp, Budvicia aquatica
tcgcgagagtaagcggacca

SEQ ID NO: 39032 - DNA, 20 bp, Streptococcus canis
gcactagtctaaggagttgc

SEQ ID NO: 39033 - DNA, 20 bp, Burkholderia multivorans
gaaagaaatccctggctcta

SEQ ID NO: 39034 - DNA, 20 bp, Brevundimonas vesicularis
ttgagtatgagagaggtgtg

SEQ ID NO: 39035 - DNA, 20 bp, Facklamia hominis
gccggtggcctaactttatg

SEQ ID NO: 39036 - DNA, 20 bp, Alicyclobacillus acidocaldarius
tgtgagtccccgcctcaacg

SEQ ID NO: 39037 - DNA, 20 bp, Bacteroides vulgatus
gcgtaaccgcgaggagcgcc

SEQ ID NO: 39038 - DNA, 20 bp, Streptococcus thermophilus
taacaatggatgacacatgt

SEQ ID NO: 39039 - DNA, 20 bp, Helcococcus kunzii
gcgcagctacctcgtgagag

SEQ ID NO: 39040 - DNA, 20 bp, Tetragenococcus halophilus
taataccgcatatggctttt

SEQ ID NO: 39041 - DNA, 20 bp, Tissierella praeacuta
gcggtaaaagatggtctcgc

SEQ ID NO: 39042 - DNA, 20 bp, Haemophilus actinemycetemcomitans
agggtaaccaaccagcgatg

SEQ ID NO: 39043 - DNA, 20 bp, Methylobacterium mesophilicum
gcttgctgccggaggatcgg

SEQ ID NO: 39044 - DNA, 20 bp, Fusobacterium varium
agatgttttcgtgcctcttc

SEQ ID NO: 39045 - DNA, 20 bp, Staphylococcus lentus
taatacaaagggcagcgaac

SEQ ID NO: 39046 - DNA, 20 bp, Bacillus sp
gcttgcttttgatcagttag

SEQ ID NO: 39047 - DNA, 20 bp, Fusobacterium nucleatum
tcttagaattatgaaagcta

SEQ ID NO: 39048 - DNA, 20 bp, Corynebacterium urealyticum
cggataggaccaatctttag

SEQ ID NO: 39049 - DNA, 20 bp, Staphylococcus carnosus
gcatggttctgcaatgaaag

SEQ ID NO: 39050 - DNA, 20 bp, Corynebacterium glucuronolyticum
gctagagatagttcgtccct

SEQ ID NO: 39051 - DNA, 20 bp, Empedobacter brevis
aactacttttatctggggat

SEQ ID NO: 39052 - DNA, 20 bp, Bacteroides uniformis
ctgaatgatgtggagacatg

SEQ ID NO: 39053 - DNA, 20 bp, Bacillus simplex
gttcttttctcgcatgagag

SEQ ID NO: 39054 - DNA, 20 bp, Bacillus pumilus
gatagttccttgaaccgcat

SEQ ID NO: 39055 - DNA, 20 bp, Cellulosimicrobium cellulans
cacgagaagccaccagagat

SEQ ID NO: 39056 - DNA, 20 bp, Proteus vulgaris
tttagaggttgtggtcttga

SEQ ID NO: 39057 - DNA, 20 bp, Campylobacter sputorum
tagataagtctcttgtgaaa

SEQ ID NO: 39058 - DNA, 20 bp, Methylobacterium mesophilicum
tggggaaaggcttgctgccg

SEQ ID NO: 39059 - DNA, 20 bp, Actinomyces odontolyticus
ccttctttgggataacgccc

SEQ ID NO: 39060 - DNA, 20 bp, Streptococcus thermophilus
atggatgacacatgtcattt

SEQ ID NO: 39061 - DNA, 20 bp, Corynebacterium confusum
gagacccttccacgggtttt

SEQ ID NO: 39062 - DNA, 20 bp, Leptotrichia buccalis
gatgattactgggtgtgggc

SEQ ID NO: 39063 - DNA, 20 bp, Actinomyces meyeri
atattcactggtcttcgcat

SEQ ID NO: 39064 - DNA, 20 bp, Corynebacterium glucuronolyticum
tgagattgggctagagatag

SEQ ID NO: 39065 - DNA, 20 bp, Proteus vulgaris
tgacgtctacggaccaaagc

SEQ ID NO: 39066 - DNA, 20 bp, Tetragenococcus halophilus
aagccgcaaggcctagcgaa

SEQ ID NO: 39067 - DNA, 20 bp, Gemella morbillorum
ttagggaagaatggatatgt

SEQ ID NO: 39068 - DNA, 20 bp, Anaerococcus tetradius
cgatctgaagcgaaactcac

SEQ ID NO: 39069 - DNA, 20 bp, Staphylococcus kloosii
cagtgaaagatggctttgct

SEQ ID NO: 39070 - DNA, 20 bp, Fusobacterium mortiferum
cgggtgatggtggcggacgg

SEQ ID NO: 39071 - DNA, 20 bp, Paenibacillus thiaminolyticus
ggcggtcatgtaagtctggt

SEQ ID NO: 39072 - DNA, 20 bp, Lactococcus lactis
aacacaagttttaagtttga

SEQ ID NO: 39073 - DNA, 20 bp, Corynebacterium glucuronolyticum
tagttcgtcccttgtggctc

SEQ ID NO: 39074 - DNA, 20 bp, Myroides odoratus
ataaagatttatcggtataa

SEQ ID NO: 39075 - DNA, 20 bp, Campylobacter lari
gtattaagagagcttgctct

SEQ ID NO: 39076 - DNA, 20 bp, Corynebacterium coyleae
acattttggatggtgtggtg

SEQ ID NO: 39077 - DNA, 20 bp, Yersinia mollaretii
aatagcacgattgattgacg

SEQ ID NO: 39078 - DNA, 20 bp, Streptococcus dysgalactiae
ttgcaccggttcaaggagtt

SEQ ID NO: 39079 - DNA, 20 bp, Streptococcus anginosus
catactgtgacggtacttaa

SEQ ID NO: 39080 - DNA, 20 bp, Bacteroides forsythus
cgggcgaccggatgccaatc

SEQ ID NO: 39081 - DNA, 20 bp, Gemella bergeri
aaaacagacggtacctaacc

SEQ ID NO: 39082 - DNA, 20 bp, Bacteroides distasonis
ggccacctggcgacagggag

SEQ ID NO: 39083 - DNA, 20 bp, Gemella bergeri
aggttgtgtagtaactatac

SEQ ID NO: 39084 - DNA, 20 bp, Prevotella disiens
aagagtgcttgcacactttg

SEQ ID NO: 39085 - DNA, 20 bp, Haemophilus actinemycetemcomitans
agagggtaaccaaccagcga

SEQ ID NO: 39086 - DNA, 20 bp, Arcanobacterium bernardiae
agggtttctggatagggatg

SEQ ID NO: 39087 - DNA, 20 bp, Streptococcus gordonii
tagaacgcacagtttatacc

SEQ ID NO: 39088 - DNA, 20 bp, Brevibacillus choshinensis
ccaatgaagagcttgctctt

SEQ ID NO: 39089 - DNA, 20 bp, Eggerthella lenta
cgtaggcggcctctcaagcg

SEQ ID NO: 39090 - DNA, 20 bp, Photobacterium damselae
gcggcagcgacttaactgaa

SEQ ID NO: 39091 - DNA, 20 bp, Moraxella bovis
tgccttcgggagcttggata

SEQ ID NO: 39092 - DNA, 20 bp, Prevotella oris
ccttaaatccggtcccagtt

SEQ ID NO: 39093 - DNA, 20 bp, Propionibacterium freudenreichii
acgtgaggaacgtgcccttg

SEQ ID NO: 39094 - DNA, 20 bp, Burkholderia cepacia
atccttggctctaatacagc

SEQ ID NO: 39095 - DNA, 20 bp, Bacteroides thetaiotaomicron
aaagattaatatccgatagc

SEQ ID NO: 39096 - DNA, 20 bp, Streptococcus infantarius
cgatgccattcctagagata

SEQ ID NO: 39097 - DNA, 20 bp, Facklamia languida
tgactaataccgcatagaat

SEQ ID NO: 39098 - DNA, 20 bp, Gemella bergeri
cctgaagacggtgacctaac

SEQ ID NO: 39099 - DNA, 20 bp, Streptococcus gordonii
tagactgtgagttgcgaacg

SEQ ID NO: 39100 - DNA, 20 bp, Gemella morbillorum
ttaaggagggagccggtcac

SEQ ID NO: 39101 - DNA, 20 bp, Propionibacterium freudenreichii
aactctcggtggagcggtgg

SEQ ID NO: 39102 - DNA, 20 bp, Streptococcus hyovaginalis
tttactctgtgacggtagct

SEQ ID NO: 39103 - DNA, 20 bp, Streptococcus equi
gttagagaagaacagtgatg

SEQ ID NO: 39104 - DNA, 20 bp, Moraxella bovis
ctagcttgctagatatgatt

SEQ ID NO: 39105 - DNA, 20 bp, Fusobacterium nucleatum
acagagatgtttcagtgtcc

SEQ ID NO: 39106 - DNA, 20 bp, Aerococcus viridans
atctacctataagcggggga

SEQ ID NO: 39107 - DNA, 20 bp, Neisseria subflava
gggaagaaaaggatagggtt

SEQ ID NO: 39108 - DNA, 20 bp, Bacillus pallidus
agggtatccaccctttagtg

SEQ ID NO: 39109 - DNA, 20 bp, Citrobacter farmeri
accttagccattgacgttac

SEQ ID NO: 39110 - DNA, 20 bp, Prevotella loescheii
cagacggcggggtaacggcc

SEQ ID NO: 39111 - DNA, 20 bp, Actinomyces naeslundii
tttccgggtcttccgcgccg

SEQ ID NO: 39112 - DNA, 20 bp, Haemophilus influenzae
tcaaattgacgttaaataca

SEQ ID NO: 39113 - DNA, 20 bp, Bacillus pumilus
caaggatgaaagacggtttc

SEQ ID NO: 39114 - DNA, 20 bp, Anaerococcus tetradius
cttgacatattacggaggga

SEQ ID NO: 39115 - DNA, 20 bp, Tetragenococcus halophilus
gtgcggcaacccttagggga

SEQ ID NO: 39116 - DNA, 20 bp, Bacteroides stercoris
gcgacgtgatgctaatccca

SEQ ID NO: 39117 - DNA, 20 bp, Streptococcus ratti
taccgcataatattaattat

SEQ ID NO: 39118 - DNA, 20 bp, Gemella bergeri
acacctgaagacggtgacct

SEQ ID NO: 39119 - DNA, 20 bp, Oligella ureolytica
ggggaattttcgacaatggg

SEQ ID NO: 39120 - DNA, 20 bp, Acinetobacter johnsonii
ggaggctacttggattaata

SEQ ID NO: 39121 - DNA, 20 bp, Pseudoramibacter alactolyticus
cgcaaggactcagcagtcga

SEQ ID NO: 39122 - DNA, 20 bp, Veillonella parvula
cgcaggcggatcagtcagtc

SEQ ID NO: 39123 - DNA, 20 bp, Brochothrix campestris
ctgcctcacagctggggata

SEQ ID NO: 39124 - DNA, 20 bp, Lactococcus lactis
cacgggagttgggagtaccc

SEQ ID NO: 39125 - DNA, 20 bp, Acinetobacter johnsonii
aggctacttggattaatact

SEQ ID NO: 39126 - DNA, 20 bp, Bacteroides merdae
gtgaagctgaggactctggt

SEQ ID NO: 39127 - DNA, 20 bp, Bacillus fusiformis
gtttcacctcatggtgaaac

SEQ ID NO: 39128 - DNA, 20 bp, Aneurinibacillus thermoaerophilus
aaccgccgggatgacctccc

SEQ ID NO: 39129 - DNA, 20 bp, Collinsella aerofaciens
gatccccccgtgccgcagcc

SEQ ID NO: 39130 - DNA, 20 bp, Gemella haemolysans
aaaaacttagcggcgaacgg

SEQ ID NO: 39131 - DNA, 20 bp, Helcococcus kunzii
gcaagcgaatcgcataaaac

SEQ ID NO: 39132 - DNA, 20 bp, Gemella morbillorum
agttggttatgctaacacta

SEQ ID NO: 39133 - DNA, 20 bp, Dermacoccus nishinomiyaensis
atacaccggaatcatgcaga

SEQ ID NO: 39134 - DNA, 20 bp, Leuconostoc lactis
cgaacgcactctcgtttaga

SEQ ID NO: 39135 - DNA, 20 bp, Clostridium septicum
tgggaggtatcaactccttc

SEQ ID NO: 39136 - DNA, 20 bp, Propionibacterium freudenreichii
gaatggaactctcggtggag

SEQ ID NO: 39137 - DNA, 20 bp, Brevibacillus brevis
gctgaaagtcggtttcggct

SEQ ID NO: 39138 - DNA, 20 bp, Tetragenococcus halophilus
agccgcaaggcctagcgaat

SEQ ID NO: 39139 - DNA, 20 bp, Prevotella bivia
gataatgaggtccttcggga

SEQ ID NO: 39140 - DNA, 20 bp, Aneurinibacillus aneurinilyticus
gcatggtctgaaagagaaag

SEQ ID NO: 39141 - DNA, 20 bp, Oligella ureolytica
aaaccacttttctcaacgaa

SEQ ID NO: 39142 - DNA, 20 bp, Fusobacterium varium
caagaagttaacagagatgt

SEQ ID NO: 39143 - DNA, 20 bp, Corynebacterium glucuronolyticum
ttctggtgtgggatgagctt

SEQ ID NO: 39144 - DNA, 20 bp, Photobacterium damselae
agcgacttaactgaaccttc

SEQ ID NO: 39145 - DNA, 20 bp, Paenibacillus macerans
gtttaaggctgtggctcaac

SEQ ID NO: 39146 - DNA, 20 bp, Arcanobacterium bernardiae
ggtgtggggccttttccacg

SEQ ID NO: 39147 - DNA, 20 bp, Arcanobacterium bernardiae
tgggggttggaaagggtttc

SEQ ID NO: 39148 - DNA, 20 bp, Prevotella intermedia
cggggataccccgttgaaag

SEQ ID NO: 39149 - DNA, 20 bp, Campylobacter curvus
cttaaccattgaactgcttg

SEQ ID NO: 39150 - DNA, 20 bp, Facklamia ignava
gttcctttcaacgcgagtgg

SEQ ID NO: 39151 - DNA, 20 bp, Campylobacter curvus
agcccaaataccaaaccggt

SEQ ID NO: 39152 - DNA, 20 bp, Bacillus fusiformis
acatcccgttgaccactgta

SEQ ID NO: 39153 - DNA, 20 bp, Prevotella bivia
tagtgttagcggctaagcga

SEQ ID NO: 39154 - DNA, 20 bp, Methylobacterium extorquens
tacctcgagagatcggggat

SEQ ID NO: 39155 - DNA, 20 bp, Alicyclobacillus acidocaldarius
gcaagaagatgcctcctcgc

SEQ ID NO: 39156 - DNA, 20 bp, Paenibacillus azotofixans
gttaacacagtaagcactcc

SEQ ID NO: 39157 - DNA, 20 bp, Streptococcus uberis
gggcaaatgcttcactatga

SEQ ID NO: 39158 - DNA, 20 bp, Yersinia pseudotuberculosis
ttggcagagatgctaaagtg

SEQ ID NO: 39159 - DNA, 20 bp, Facklamia ignava
ctttgatgcatagccgacct

SEQ ID NO: 39160 - DNA, 20 bp, Lactococcus garvieae
tgtattagctagttggtagt

SEQ ID NO: 39161 - DNA, 20 bp, Peptoniphilus indolicus
cttgagtagtgaagaggtaa

SEQ ID NO: 39162 - DNA, 20 bp, Streptococcus oralis
ctgaagcttggtgcttgcat

SEQ ID NO: 39163 - DNA, 20 bp, Bacillus azotoformans
gagcttgctcctttagattc

SEQ ID NO: 39164 - DNA, 20 bp, Tetragenococcus halophilus
ttttcacctgaaagaaagct

SEQ ID NO: 39165 - DNA, 20 bp, Shewanella algae
gccttgcgctgatggataag

SEQ ID NO: 39166 - DNA, 20 bp, Alicyclobacillus acidocaldarius
gtttccgggcgttattccgg

SEQ ID NO: 39167 - DNA, 20 bp, Propionibacterium acnes
gtaaaccgctttcgcctgtg

SEQ ID NO: 39168 - DNA, 20 bp, Neisseria subflava
agggaagaaaaggatagggt

SEQ ID NO: 39169 - DNA, 20 bp, Moraxella  catarrhalis
ttaccagcgactcggtcggg

SEQ ID NO: 39170 - DNA, 20 bp, Leptotrichia buccalis
acgcatgtgcccggcaatga

SEQ ID NO: 39171 - DNA, 20 bp, Chromobacterium violaceum
gtgagtttcaccagaagtgg

SEQ ID NO: 39172 - DNA, 20 bp, Stenotrophomonas maltophilia
atccagctggttaatacccg

SEQ ID NO: 39173 - DNA, 20 bp, Clostridium tetani
gtaactgaggaagtcccttc

SEQ ID NO: 39174 - DNA, 20 bp, Streptococcus infantarius
ctcttcaaactttagcaagc

SEQ ID NO: 39175 - DNA, 20 bp, Leptotrichia buccalis
aaattcgtagatatgtgcag

SEQ ID NO: 39176 - DNA, 20 bp, Prevotella corporis
gcagttgccatcgggtcatg

SEQ ID NO: 39177 - DNA, 20 bp, Bordetella bronchiseptica
aggaaagaaacggcacgggc

SEQ ID NO: 39178 - DNA, 20 bp, Methylobacterium mesophilicum
acatggcgtgttatggggag

SEQ ID NO: 39179 - DNA, 20 bp, Staphylococcus saccharolyticus
gcgattccatcttcatatag

SEQ ID NO: 39180 - DNA, 20 bp, Gemella bergeri
gggaggagccggtcacggtg

SEQ ID NO: 39181 - DNA, 20 bp, Facklamia ignava
ataaccatcggaaacgatga

SEQ ID NO: 39182 - DNA, 20 bp, Serratia proteamaculans
tgttaatagcacattgcatt

SEQ ID NO: 39183 - DNA, 20 bp, Campylobacter sputorum
tacttattgcgaaggcgatc

SEQ ID NO: 39184 - DNA, 20 bp, Lactococcus garvieae
caaccattgtgtgcattgga

SEQ ID NO: 39185 - DNA, 20 bp, Paenibacillus larvae
gagctaataccggatagctg

SEQ ID NO: 39186 - DNA, 20 bp, Neisseria lactamica
acccggttttgacatgtacg

SEQ ID NO: 39187 - DNA, 20 bp, Bacteroides vulgatus
gagtggatgccaatcccaaa

SEQ ID NO: 39188 - DNA, 20 bp, Moraxella lacunata
agcgagcgtaggtggtcatt

SEQ ID NO: 39189 - DNA, 20 bp, Veillonella atypica
atcaatcttagtggcgaacg

SEQ ID NO: 39190 - DNA, 20 bp, Brevibacillus parabrevis
gataggtttttggattgcat

SEQ ID NO: 39191 - DNA, 20 bp, Anaerococcus prevotii
aaatgatcaaagctccggcg

SEQ ID NO: 39192 - DNA, 20 bp, Fusobacterium mortiferum
gaaattcatatgaaagctat

SEQ ID NO: 39193 - DNA, 20 bp, Tetragenococcus halophilus
tttttttcacctgaaagaaa

SEQ ID NO: 39194 - DNA, 20 bp, Prevotella loescheii
ccgtaccggaagtgcggtgg

SEQ ID NO: 39195 - DNA, 20 bp, Anaerobiospirillum succiniciproducens
atgcaccagaagtagttagc

SEQ ID NO: 39196 - DNA, 20 bp, Acinetobacter junii
aggctactgagactaatact

SEQ ID NO: 39197 - DNA, 20 bp, Tissierella praeacuta
gatttaagtcaaagcgtaaa

SEQ ID NO: 39198 - DNA, 20 bp, Yersinia frederiksenii
atgacctcgaaagagcaaag

SEQ ID NO: 39199 - DNA, 20 bp, Brevibacillus laterosporus
gaggctcaacctcggttcgc

SEQ ID NO: 39200 - DNA, 20 bp, Alicyclobacillus acidocaldarius
cgggctcctctctcagcggc

SEQ ID NO: 39201 - DNA, 20 bp, Clostridium innocuum
cttccaaaaagacttagtgg

SEQ ID NO: 39202 - DNA, 20 bp, Ochrobactrum intermedium
tgttagtcttgagtatggta

SEQ ID NO: 39203 - DNA, 20 bp, Actinomyces bovis
agtttatggttaaagttcgg

SEQ ID NO: 39204 - DNA, 20 bp, Moraxella lacunata
gcatacgtcttacgagagaa

SEQ ID NO: 39205 - DNA, 20 bp, Helcococcus kunzii
acaatggtctgaacaaagcg

SEQ ID NO: 39206 - DNA, 20 bp, Arcanobacterium pyogenes
cagctttcggggtggtgtac

SEQ ID NO: 39207 - DNA, 20 bp, Campylobacter lari
gagtattaagagagcttgct

SEQ ID NO: 39208 - DNA, 20 bp, Moraxella  catarrhalis
cgaacgaagttaggaagctt

SEQ ID NO: 39209 - DNA, 20 bp, Pseudoramibacter alactolyticus
agtaaagccttatattatgg

SEQ ID NO: 39210 - DNA, 20 bp, Facklamia hominis
accgcatagaatcgcagatc

SEQ ID NO: 39211 - DNA, 20 bp, Alcaligenes faecalis
gctgttggggccgttaggcc

SEQ ID NO: 39212 - DNA, 20 bp, Acinetobacter lwoffii
agggatagtggacgttactc

SEQ ID NO: 39213 - DNA, 20 bp, Streptococcus equi
gtcggtgaggtaaccgttaa

SEQ ID NO: 39214 - DNA, 20 bp, Acinetobacter johnsonii
tagcttgctacctaacctag

SEQ ID NO: 39215 - DNA, 20 bp, Dermacoccus nishinomiyaensis
agcccgtaccggaaggtgcg

SEQ ID NO: 39216 - DNA, 20 bp, Campylobacter concisus
taatactggatacgacatgt

SEQ ID NO: 39217 - DNA, 20 bp, Streptococcus thermophilus
acacatgtcatttatttgaa

SEQ ID NO: 39218 - DNA, 20 bp, Achromobacter piechaudii
acgtcatgggctaatacccc

SEQ ID NO: 39219 - DNA, 20 bp, Alcaligenes faecalis
gaggtactgctgacggtatc

SEQ ID NO: 39220 - DNA, 20 bp, Pseudoramibacter alactolyticus
ttagaactggaaagtggcga

SEQ ID NO: 39221 - DNA, 20 bp, Pseudoramibacter alactolyticus
gaaggttttgaatgatcctt

SEQ ID NO: 39222 - DNA, 20 bp, Porphyromonas maccae
actgggcgtatgcgatatac

SEQ ID NO: 39223 - DNA, 20 bp, Clostridium glycolicum
taggtggtttcttaagtcag

SEQ ID NO: 39224 - DNA, 20 bp, Haemophilus actinemycetemcomitans
ctcagagatgggtttgtgcc

SEQ ID NO: 39225 - DNA, 20 bp, Actinomyces neuii
tgggtggggactcgtgagag

SEQ ID NO: 39226 - DNA, 20 bp, Streptococcus pyogenes
tccaccaagtgacggtaact

SEQ ID NO: 39227 - DNA, 20 bp, Acinetobacter haemolyticus
gtcagctagagtatgggaga

SEQ ID NO: 39228 - DNA, 20 bp, Pasteurella aerogenes
gaggaaggcggttagtttaa

SEQ ID NO: 39229 - DNA, 20 bp, Leptotrichia buccalis
gccagcacgcatgtgcccgg

SEQ ID NO: 39230 - DNA, 20 bp, Bacteroides vulgatus
cgctaccacgcgagtggatg

SEQ ID NO: 39231 - DNA, 20 bp, Virgibacillus pantothenticus
tctccttcgggggtgacgct

SEQ ID NO: 39232 - DNA, 20 bp, Peptostreptococcus anaerobius
agtcggtggttaaaggctac

SEQ ID NO: 39233 - DNA, 20 bp, Stenotrophomonas maltophilia
agaaatccagctggttaata

SEQ ID NO: 39234 - DNA, 20 bp, Bacillus sp
gaagccgtgaggccaagcaa

SEQ ID NO: 39235 - DNA, 20 bp, Alcaligenes faecalis
gtctggaaagccgaagagat

SEQ ID NO: 39236 - DNA, 20 bp, Leuconostoc pseudomesenteroides
agctagaatagggaatgatt

SEQ ID NO: 39237 - DNA, 20 bp, Neisseria subflava
gaagaaaaggatagggttaa

SEQ ID NO: 39238 - DNA, 20 bp, Neisseria meningitidis
tgctttctctctcaagacgt

SEQ ID NO: 39239 - DNA, 20 bp, Facklamia ignava
gaatgggaaagacggcttcg

SEQ ID NO: 39240 - DNA, 20 bp, Aerococcus viridans
gaatctacctataagcgggg

SEQ ID NO: 39241 - DNA, 20 bp, Porphyromonas endodontalis
gggggactgagaggttgacc

SEQ ID NO: 39242 - DNA, 20 bp, Sphingobacterium multivorum
ggggtgaaatacggtggctc

SEQ ID NO: 39243 - DNA, 20 bp, Clostridium tetani
gtaggagggtccaaccttct

SEQ ID NO: 39244 - DNA, 20 bp, Tissierella praeacuta
aagcatttgaaactgaaagg

SEQ ID NO: 39245 - DNA, 20 bp, Moraxella osloensis
ggcataatattgacactgag

SEQ ID NO: 39246 - DNA, 20 bp, Anaerococcus prevotii
ccggcggtctaagatggact

SEQ ID NO: 39247 - DNA, 20 bp, Prevotella bivia
cattctcagttcggactggg

SEQ ID NO: 39248 - DNA, 20 bp, Corynebacterium group F
gtggtttcccttgtggtcgc

SEQ ID NO: 39249 - DNA, 20 bp, Acinetobacter calcoaceticus
atggtgcttgcactatcact

SEQ ID NO: 39250 - DNA, 20 bp, Bacillus alcalophilus
tcaaaggaatcacatggttc

SEQ ID NO: 39251 - DNA, 20 bp, Propionibacterium propionicus
ggaaacgtctagagataggc

SEQ ID NO: 39252 - DNA, 20 bp, Neisseria polysaccharea
tgggtaggataaccgcaagg

SEQ ID NO: 39253 - DNA, 20 bp, Bacillus circulans
tcatgaggaaaagctgaaag

SEQ ID NO: 39254 - DNA, 20 bp, Veillonella dispar
tagaaggattgacggtaccg

SEQ ID NO: 39255 - DNA, 20 bp, Bacteroides uniformis
caatccctaaagcctctctc

SEQ ID NO: 39256 - DNA, 20 bp, Lactococcus garvieae
cgggacacgggatacaggtg

SEQ ID NO: 39257 - DNA, 20 bp, Prevotella corporis
ggcttgaattgcaggagaat

SEQ ID NO: 39258 - DNA, 20 bp, Methylobacterium mesophilicum
accgcagtagcgcagctaac

SEQ ID NO: 39259 - DNA, 20 bp, Anaerococcus prevotii
ctgaggaccggtatagagat

SEQ ID NO: 39260 - DNA, 20 bp, Actinomyces bovis
ctggtagactagagtgcagg

SEQ ID NO: 39261 - DNA, 20 bp, Anaerococcus prevotii
aaactgcatatcttgagaag

SEQ ID NO: 39262 - DNA, 20 bp, Capnocytophaga ochracea
aggcgcgaatctataaagac

SEQ ID NO: 39263 - DNA, 20 bp, Tissierella praeacuta
cgaagccagtgagctaacca

SEQ ID NO: 39264 - DNA, 20 bp, Leptotrichia buccalis
agtgtccgtgccgaagctaa

SEQ ID NO: 39265 - DNA, 20 bp, Streptococcus constellatus
gaacatttactgcatggtag

SEQ ID NO: 39266 - DNA, 20 bp, Paenibacillus validus
cgaatccttagaagccggtc

SEQ ID NO: 39267 - DNA, 20 bp, Alicyclobacillus acidocaldarius
tgagccatggactttcactc

SEQ ID NO: 39268 - DNA, 20 bp, Micrococcus luteus
ccttgtacacccgcccgtca

SEQ ID NO: 39269 - DNA, 20 bp, Eggerthella lenta
cgagttcggtagaggcaggc

SEQ ID NO: 39270 - DNA, 20 bp, Moraxella  catarrhalis
tgcttctgatacttagtggc

SEQ ID NO: 39271 - DNA, 20 bp, Clostridium cadaveris
taggggtttcgatacctctg

SEQ ID NO: 39272 - DNA, 20 bp, Kocuria rosea
aataccggataatatttagc

SEQ ID NO: 39273 - DNA, 20 bp, Bacteroides eggerthii
ctttgtatgtaccgtatgaa

SEQ ID NO: 39274 - DNA, 20 bp, Dolosicoccus paucivorans
atagcttagagataagtgaa

SEQ ID NO: 39275 - DNA, 20 bp, Capnocytophaga ochracea
ccccaaggctatgatagata

SEQ ID NO: 39276 - DNA, 20 bp, Abiotrophia defectiva
aagggagtgtaggcggtctt

SEQ ID NO: 39277 - DNA, 20 bp, Clostridium botulinum
caatggtaggtacaataaga

SEQ ID NO: 39278 - DNA, 20 bp, Brevibacillus choshinensis
cgagcggaccaatgaagagc

SEQ ID NO: 39279 - DNA, 20 bp, Brochothrix campestris
tggataatacaaagggtcgc

SEQ ID NO: 39280 - DNA, 20 bp, Facklamia ignava
tcctttcaacgcgagtggcg

SEQ ID NO: 39281 - DNA, 20 bp, Sporosarcina pasteurii
tatctctataccggtcagcg

SEQ ID NO: 39282 - DNA, 20 bp, Prevotella disiens
cacgatacagagatgttgag

SEQ ID NO: 39283 - DNA, 20 bp, Aerococcus viridans
tagatgaccttgcggtgcat

SEQ ID NO: 39284 - DNA, 20 bp, Oligella ureolytica
attctctacggaggaaaggg

SEQ ID NO: 39285 - DNA, 20 bp, Corynebacterium glucuronolyticum
ccagcttgctggagtgctcg

SEQ ID NO: 39286 - DNA, 20 bp, Bacteroides fragilis
tgagcaatcaccgctgtgaa

SEQ ID NO: 39287 - DNA, 20 bp, Bacillus sp
cggcgcaagctgtcacttac

SEQ ID NO: 39288 - DNA, 20 bp, Clostridium clostridiiforme
ataagcgcacagggccgcat

SEQ ID NO: 39289 - DNA, 20 bp, Aeromonas sobria
ttaaaactgttcagctagag

SEQ ID NO: 39290 - DNA, 20 bp, Cellulosimicrobium cellulans
gacatgcacgagaagccacc

SEQ ID NO: 39291 - DNA, 20 bp, Oligella urethralis
tctctcatgctgccgttcga

SEQ ID NO: 39292 - DNA, 20 bp, Fusobacterium mortiferum
aaagctatatgcgctgcagg

SEQ ID NO: 39293 - DNA, 20 bp, Corynebacterium afermentans
agctactgaccatgcggtcg

SEQ ID NO: 39294 - DNA, 20 bp, Actinomyces odontolyticus
cactgcagagatgtggtggc

SEQ ID NO: 39295 - DNA, 20 bp, Streptococcus equi
tattcttagagataagaagt

SEQ ID NO: 39296 - DNA, 20 bp, Bacillus alcalophilus
catggttcttttgtaaaaga

SEQ ID NO: 39297 - DNA, 20 bp, Moraxella osloensis
tgagtaacatttaggaatct

SEQ ID NO: 39298 - DNA, 20 bp, Acinetobacter lwoffii
agattaatactcttggatag

SEQ ID NO: 39299 - DNA, 20 bp, Comamonas terrigena
tactagagcggccgatggca

SEQ ID NO: 39300 - DNA, 20 bp, Moraxella  catarrhalis
ggtcttttaaagacttagtg

SEQ ID NO: 39301 - DNA, 20 bp, Peptostreptococcus anaerobius
ggtggcgtcgataactgggg

SEQ ID NO: 39302 - DNA, 20 bp, Chromobacterium violaceum
atacgagcagccgacgtctg

SEQ ID NO: 39303 - DNA, 20 bp, Vibrio hollisae
tccgccagaagtgggtaggg

SEQ ID NO: 39304 - DNA, 20 bp, Bacillus schlegellii
tctgctgtgaaaggccacgg

SEQ ID NO: 39305 - DNA, 20 bp, Veillonella atypica
aactgctgatctagagtatc

SEQ ID NO: 39306 - DNA, 20 bp, Oligella urethralis
tctcatgctgccgttcgact

SEQ ID NO: 39307 - DNA, 20 bp, Helcococcus ovis
aaagggtacgtaggcggtaa

SEQ ID NO: 39308 - DNA, 20 bp, Paenibacillus glucanolyticus
taataccggataatttatta

SEQ ID NO: 39309 - DNA, 20 bp, Aerococcus christensenii
aactagttggcgaggtaacg

SEQ ID NO: 39310 - DNA, 20 bp, Paenibacillus lautus
cagcattgtggaataatgaa

SEQ ID NO: 39311 - DNA, 20 bp, Anaerobiospirillum succiniciproducens
atgtaggcggaaaggtaagt

SEQ ID NO: 39312 - DNA, 20 bp, Acinetobacter johnsonii
tgctacctaacctagcggcg

SEQ ID NO: 39313 - DNA, 20 bp, Neisseria sicca
gaactgggtggctagagtgt

SEQ ID NO: 39314 - DNA, 20 bp, Acinetobacter junii
gagcggagatgaggtgcttg

SEQ ID NO: 39315 - DNA, 20 bp, Clostridium tetani
cggtttcctggactgtaact

SEQ ID NO: 39316 - DNA, 20 bp, Acinetobacter haemolyticus
ggaggctactctagttaata

SEQ ID NO: 39317 - DNA, 20 bp, Prevotella melaninogenica
agggatggtgtaatgcaaat

SEQ ID NO: 39318 - DNA, 20 bp, Brevibacillus brevis
atccttttcctctcatgagg

SEQ ID NO: 39319 - DNA, 20 bp, Clostridium clostridiiforme
cttcggagcaatggagacag

SEQ ID NO: 39320 - DNA, 20 bp, Eikenella corrodens
gaagaaaagggaagtgctaa

SEQ ID NO: 39321 - DNA, 20 bp, Actinomyces naeslundii
tgtcgcatggtgggcctggg

SEQ ID NO: 39322 - DNA, 20 bp, Streptococcus porcinus
tccttctgaccggcctagag

SEQ ID NO: 39323 - DNA, 20 bp, Actinomyces bovis
gagggaatgcttcttatatg

SEQ ID NO: 39324 - DNA, 20 bp, Corynebacterium glucuronolyticum
gtacagtgcgtgtgcgacac

SEQ ID NO: 39325 - DNA, 20 bp, Bacteroides ureolyticus
aactgatagtctagagtagg

SEQ ID NO: 39326 - DNA, 20 bp, Prevotella bivia
ctgtcagacttgagtgcgca

SEQ ID NO: 39327 - DNA, 20 bp, Eggerthella lenta
ggcctctcaagcgggatctc

SEQ ID NO: 39328 - DNA, 20 bp, Anaerococcus prevotii
ggtaggataggtgactgggg

SEQ ID NO: 39329 - DNA, 20 bp, Streptococcus parasanguinis
gacttgaaaggtgcaaatgc

SEQ ID NO: 39330 - DNA, 20 bp, Fusobacterium mortiferum
attcatatgaaagctatatg

SEQ ID NO: 39331 - DNA, 20 bp, Alicyclobacillus acidocaldarius
aagaagatgcctcctcgcgg

SEQ ID NO: 39332 - DNA, 20 bp, Pseudoramibacter alactolyticus
tcagcagtcgaaggtggggc

SEQ ID NO: 39333 - DNA, 20 bp, Propionibacterium avidum
gggtatgcctccttgtgggg

SEQ ID NO: 39334 - DNA, 20 bp, Oligella urethralis
ttcgtcccacacgcgagatg

SEQ ID NO: 39335 - DNA, 20 bp, Propionibacterium freudenreichii
cggtatagctccaggaaact

SEQ ID NO: 39336 - DNA, 20 bp, Streptococcus constellatus
gtttaaaaggtgcaagagca

SEQ ID NO: 39337 - DNA, 20 bp, Leptotrichia buccalis
tccgtgccgaagctaatgcg

SEQ ID NO: 39338 - DNA, 20 bp, Arcanobacterium bernardiae
tgcagccttcggggtggtgt

SEQ ID NO: 39339 - DNA, 20 bp, Campylobacter sputorum
acatcctttgacccttctag

SEQ ID NO: 39340 - DNA, 20 bp, Arcanobacterium bernardiae
tttctggatagggatgggct

SEQ ID NO: 39341 - DNA, 20 bp, Oligella ureolytica
catcccgcgtgtgggacgaa

SEQ ID NO: 39342 - DNA, 20 bp, Leptotrichia buccalis
aggtgtggatagtgattggg

SEQ ID NO: 39343 - DNA, 20 bp, Anaerococcus tetradius
ctgctcatcttgaggtatgg

SEQ ID NO: 39344 - DNA, 20 bp, Gemella bergeri
aagtgttggtctcaaaagag

SEQ ID NO: 39345 - DNA, 20 bp, Facklamia ignava
atgggaaagacggcttcggc

SEQ ID NO: 39346 - DNA, 20 bp, Streptococcus equinus
acagcatttaacacatgtta

SEQ ID NO: 39347 - DNA, 20 bp, Eikenella corrodens
cagacggttatttaagcagg

SEQ ID NO: 39348 - DNA, 20 bp, Methylobacterium mesophilicum
cttttggggaaaggcttgct

SEQ ID NO: 39349 - DNA, 20 bp, Campylobacter curvus
gatagggctatatcgtatca

SEQ ID NO: 39350 - DNA, 20 bp, Vibrio cholerae
aaatgattaaggtattaact

SEQ ID NO: 39351 - DNA, 20 bp, Virgibacillus proomii
agcgcgggaagcaagcagaa

SEQ ID NO: 39352 - DNA, 20 bp, Clostridium clostridiiforme
tagacggcgaagcaagtctg

SEQ ID NO: 39353 - DNA, 20 bp, Bacteroides thetaiotaomicron
tgcaaactggagatggcgac

SEQ ID NO: 39354 - DNA, 20 bp, Streptococcus gordonii
ataccgtagcttgctacacc

SEQ ID NO: 39355 - DNA, 20 bp, Alicyclobacillus acidocaldarius
gctcgaccgcctacgcaccc

SEQ ID NO: 39356 - DNA, 20 bp, Actinomyces neuii
tgtaaactcctttcgcccgc

SEQ ID NO: 39357 - DNA, 20 bp, Campylobacter lari
acacaagttgagtagggaaa

SEQ ID NO: 39358 - DNA, 20 bp, Streptococcus equi
atttaaaaggagcaacagct

SEQ ID NO: 39359 - DNA, 20 bp, Facklamia hominis
gatcaacgaaggaaagacgg

SEQ ID NO: 39360 - DNA, 20 bp, Peptoniphilus indolicus
aatggtcggaacaaagagcg

SEQ ID NO: 39361 - DNA, 20 bp, Peptostreptococcus anaerobius
agtttactaatacatgataa

SEQ ID NO: 39362 - DNA, 20 bp, Streptococcus uberis
tatttaaaaggggcaaatgc

SEQ ID NO: 39363 - DNA, 20 bp, Corynebacterium auris
ttgacatgcactggatcggg

SEQ ID NO: 39364 - DNA, 20 bp, Brochothrix campestris
ataccgaatgtgctgaacat

SEQ ID NO: 39365 - DNA, 20 bp, Anaerococcus prevotii
cagggcttgacatactgagg

SEQ ID NO: 39366 - DNA, 20 bp, Empedobacter brevis
ttatctggggataaacctac

SEQ ID NO: 39367 - DNA, 20 bp, Bacteroides merdae
gatgctaatctccaaaccat

SEQ ID NO: 39368 - DNA, 20 bp, Campylobacter lari
ttatagagatatgagggtgc

SEQ ID NO: 39369 - DNA, 20 bp, Ignavigranum ruoffiae
tctgacactgacactgaggc

SEQ ID NO: 39370 - DNA, 20 bp, Brevibacillus brevis
aaggtagccgcatcggaagg

SEQ ID NO: 39371 - DNA, 20 bp, Bacillus fusiformis
gtacagtagtaactggctgt

SEQ ID NO: 39372 - DNA, 20 bp, Bacteroides forsythus
gtaagctgtgaggaaggttg

SEQ ID NO: 39373 - DNA, 20 bp, Streptococcus hyovaginalis
tttcccttcggggcactggt

SEQ ID NO: 39374 - DNA, 20 bp, Helcococcus kunzii
gaatctaactgacgctgaga

SEQ ID NO: 39375 - DNA, 20 bp, Arcanobacterium bernardiae
tacactgcgatgtgccagag

SEQ ID NO: 39376 - DNA, 20 bp, Corynebacterium group ANF
ttcccttgtggattgcgggt

SEQ ID NO: 39377 - DNA, 20 bp, Actinomyces neuii
gttgggtacgggcaggcttg

SEQ ID NO: 39378 - DNA, 20 bp, Prevotella melaninogenica
acgctcaacgtctgacttgc

SEQ ID NO: 39379 - DNA, 20 bp, Bacteroides uniformis
cgatggcatagttcttccgc

SEQ ID NO: 39380 - DNA, 20 bp, Streptococcus infantarius
taacagcatttaacccatgt

SEQ ID NO: 39381 - DNA, 20 bp, Clostridium ramosum
gtcttgacatactcataaag

SEQ ID NO: 39382 - DNA, 20 bp, Helcococcus kunzii
gttgatttcttcggaatgaa

SEQ ID NO: 39383 - DNA, 20 bp, Bacillus schlegellii
taaagaccgggataacaccg

SEQ ID NO: 39384 - DNA, 20 bp, Methylobacterium mesophilicum
gggaaaggcttgctgccgga

SEQ ID NO: 39385 - DNA, 20 bp, Neisseria flavescens
atcgacagctgatgacggta

SEQ ID NO: 39386 - DNA, 20 bp, Leuconostoc pseudomesenteroides
ttggcgtcacctagagatgg

SEQ ID NO: 39387 - DNA, 20 bp, Streptococcus thermophilus
caccgagcggatgagttgcg

SEQ ID NO: 39388 - DNA, 20 bp, Granulicatella elegans
ggcttctgctgatggatgga

SEQ ID NO: 39389 - DNA, 20 bp, Streptococcus agalactiae
gcataagagtaattaacaca

SEQ ID NO: 39390 - DNA, 20 bp, Pseudoramibacter alactolyticus
gaaaactccggtgccatagg

SEQ ID NO: 39391 - DNA, 20 bp, Actinomyces bovis
agggcagcgaagcagcgatg

SEQ ID NO: 39392 - DNA, 20 bp, Pediococcus dextrinicus
ctagcgccaatcctagagat

SEQ ID NO: 39393 - DNA, 20 bp, Bacillus megaterium
ttcatgggagatgattgaaa

SEQ ID NO: 39394 - DNA, 20 bp, Streptococcus canis
tgcttgcactagtctaagga

SEQ ID NO: 39395 - DNA, 20 bp, Kingella kingae
ataccgcatacgctttgaga

SEQ ID NO: 39396 - DNA, 20 bp, Enterococcus casseliflavus
ttttccgcatggaagaaagt

SEQ ID NO: 39397 - DNA, 20 bp, Bacteroides thetaiotaomicron
ttaatacccgatggtataat

SEQ ID NO: 39398 - DNA, 20 bp, Campylobacter rectus
taagtagcttgctatttaat

SEQ ID NO: 39399 - DNA, 20 bp, Brevibacterium epidermidis
gaacccgtgagggtaagcga

SEQ ID NO: 39400 - DNA, 20 bp, Eggerthella lenta
gatctctaatccgagggctc

SEQ ID NO: 39401 - DNA, 20 bp, Paenibacillus azotofixans
tgacatccctctgaatacgt

SEQ ID NO: 39402 - DNA, 20 bp, Campylobacter sputorum
gttcgatagtgaaagatggc

SEQ ID NO: 39403 - DNA, 20 bp, Leptotrichia buccalis
ctgaagccgccggtccaacc

SEQ ID NO: 39404 - DNA, 20 bp, Streptococcus porcinus
gtagaagacccatgtcatct

SEQ ID NO: 39405 - DNA, 20 bp, Alicyclobacillus acidocaldarius
cgctctccccgagcaacaga

SEQ ID NO: 39406 - DNA, 20 bp, Lactococcus lactis
aagatgatcccgcgttgtat

SEQ ID NO: 39407 - DNA, 20 bp, Helcococcus kunzii
agcgaatcgcataaaacaga

SEQ ID NO: 39408 - DNA, 20 bp, Moraxella atlantae
agtaacatttaggaaactgc

SEQ ID NO: 39409 - DNA, 20 bp, Sporosarcina pasteurii
gttccttcatgcgaaggaac

SEQ ID NO: 39410 - DNA, 20 bp, Gemella sanguinis
aactatatacagtagagacg

SEQ ID NO: 39411 - DNA, 20 bp, Paenibacillus amylolyticus
ccggtagagtaactgctatc

SEQ ID NO: 39412 - DNA, 20 bp, Corynebacterium glucuronolyticum
gcttaacttttggttggcag

SEQ ID NO: 39413 - DNA, 20 bp, Anaerococcus prevotii
gttcgcaggcggaaatgcaa

SEQ ID NO: 39414 - DNA, 20 bp, Pasteurella multocida
tacggactaaagggtgggac

SEQ ID NO: 39415 - DNA, 20 bp, Propionibacterium freudenreichii
tatgcggtcagggatcgtct

SEQ ID NO: 39416 - DNA, 20 bp, Peptostreptococcus anaerobius
taggtggtctttcaagtcgg

SEQ ID NO: 39417 - DNA, 20 bp, Helcococcus kunzii
ttgatttcttcggaatgaaa

SEQ ID NO: 39418 - DNA, 20 bp, Gemella haemolysans
acagtagagacggtacctaa

SEQ ID NO: 39419 - DNA, 20 bp, Microbacterium hominis
ggtcagtagctggaaagatt

SEQ ID NO: 39420 - DNA, 20 bp, Neisseria meningitidis
tcatcagccgctgatattag

SEQ ID NO: 39421 - DNA, 20 bp, Streptococcus constellatus
acaccgtattctgtgagttg

SEQ ID NO: 39422 - DNA, 20 bp, Corynebacterium amycolatum
ggtgtggatgctgtggtgga

SEQ ID NO: 39423 - DNA, 20 bp, Facklamia ignava
gtaacggcctaccgtggctt

SEQ ID NO: 39424 - DNA, 20 bp, Corynebacterium accolens
ggtctttctacgactttcgt

SEQ ID NO: 39425 - DNA, 20 bp, Bacteroides vulgatus
gcaaggcatctgtgaaggtg

SEQ ID NO: 39426 - DNA, 20 bp, Staphylococcus aureus
caagcttctcgtccgttcgc

SEQ ID NO: 39427 - DNA, 20 bp, Lactococcus garvieae
attgtgtgcattggaaactg

SEQ ID NO: 39428 - DNA, 20 bp, Bacteroides uniformis
ttatacgggaataaagtgag

SEQ ID NO: 39429 - DNA, 20 bp, Acinetobacter haemolyticus
gctacattacctagcggcgg

SEQ ID NO: 39430 - DNA, 20 bp, Moraxella lacunata
ttgggtctcttgaagactta

SEQ ID NO: 39431 - DNA, 20 bp, Porphyromonas endodontalis
tgcagctcaactgtagtctt

SEQ ID NO: 39432 - DNA, 20 bp, Prevotella loescheii
gccagacggcggggtaacgg

SEQ ID NO: 39433 - DNA, 20 bp, Moraxella bovis
gactatctagcttgctagat

SEQ ID NO: 39434 - DNA, 20 bp, Clostridium glycolicum
gggcagccaagtcgtgaggc

SEQ ID NO: 39435 - DNA, 20 bp, Prevotella melaninogenica
catactggtttccttgagta

SEQ ID NO: 39436 - DNA, 20 bp, Brochothrix campestris
gcctcacagctggggataac

SEQ ID NO: 39437 - DNA, 20 bp, Streptococcus sp.
aaaattgattattgcatgat

SEQ ID NO: 39438 - DNA, 20 bp, Delftia acidovorans
ctaatacgagaggcccatga

SEQ ID NO: 39439 - DNA, 20 bp, Anaerococcus prevotii
aatggaagatacaaagggaa

SEQ ID NO: 39440 - DNA, 20 bp, Kingella kingae
gggaagaaaaggttgatgct

SEQ ID NO: 39441 - DNA, 20 bp, Actinomyces bovis
cttcttatatgacggtacct

SEQ ID NO: 39442 - DNA, 20 bp, Campylobacter concisus
atgggttgcgatgccgcgag

SEQ ID NO: 39443 - DNA, 20 bp, Staphylococcus sciuri
aagcaaatcccataaaatta

SEQ ID NO: 39444 - DNA, 20 bp, Streptococcus dysgalactiae
ttcaaggagttgcgaacggg

SEQ ID NO: 39445 - DNA, 20 bp, Facklamia ignava
accgtggagttgcattggaa

SEQ ID NO: 39446 - DNA, 20 bp, Peptoniphilus indolicus
ctaaacttgagtagtgaaga

SEQ ID NO: 39447 - DNA, 20 bp, Stenotrophomonas maltophilia
atgagcccatatgggattag

SEQ ID NO: 39448 - DNA, 20 bp, Acinetobacter genospecies 3
tagcctaactgcaaagaggg

SEQ ID NO: 39449 - DNA, 20 bp, Peptostreptococcus anaerobius
gcgtcgataactggggtgaa

SEQ ID NO: 39450 - DNA, 20 bp, Clostridium paraputrificum
tggtgatctaacccgtaagg

SEQ ID NO: 39451 - DNA, 20 bp, Anaerococcus tetradius
gatctgaagcgaaactcaca

SEQ ID NO: 39452 - DNA, 20 bp, Granulicatella adiacens
tggtcaatctagtggcgaac

SEQ ID NO: 39453 - DNA, 20 bp, Corynebacterium afermentans
acaagggttgggccaccgct

SEQ ID NO: 39454 - DNA, 20 bp, Prevotella bivia
aggttctgctgggcactctg

SEQ ID NO: 39455 - DNA, 20 bp, Helcococcus kunzii
gtatgtaggcggttaattaa

SEQ ID NO: 39456 - DNA, 20 bp, Gemella haemolysans
gtcgagcgaagtttttctgg

SEQ ID NO: 39457 - DNA, 20 bp, Anaerobiospirillum succiniciproducens
tacagagggaaacgataccg

SEQ ID NO: 39458 - DNA, 20 bp, Campylobacter rectus
cgaacggagattaagtagct

SEQ ID NO: 39459 - DNA, 20 bp, Moraxella lacunata
gagagaaagggggcttttag

SEQ ID NO: 39460 - DNA, 20 bp, Leptotrichia buccalis
gccgatgatgaagatagttc

SEQ ID NO: 39461 - DNA, 20 bp, Eggerthella lenta
gcgggatctctaatccgagg

SEQ ID NO: 39462 - DNA, 20 bp, Acinetobacter calcoaceticus
gaggaggaggctactgaagt

SEQ ID NO: 39463 - DNA, 20 bp, Leptotrichia buccalis
gtttggctagagtgctggag

SEQ ID NO: 39464 - DNA, 20 bp, Bacteroides thetaiotaomicron
agtttgcttgcaaactggag

SEQ ID NO: 39465 - DNA, 20 bp, Actinomyces neuii
tgttgggaaaggttttttct

SEQ ID NO: 39466 - DNA, 20 bp, Corynebacterium glucuronolyticum
acagtgcgtgtgcgacaccg

SEQ ID NO: 39467 - DNA, 20 bp, Gemella haemolysans
taactatacacagtagagac

SEQ ID NO: 39468 - DNA, 20 bp, Prevotella intermedia
acggcctaatacccgatgtt

SEQ ID NO: 39469 - DNA, 20 bp, Corynebacterium group F
ctaccttgtgaggggatgct

SEQ ID NO: 39470 - DNA, 20 bp, Streptococcus agalactiae
taccgcataagagtaattaa

SEQ ID NO: 39471 - DNA, 20 bp, Eggerthella lenta
atcccgaactgggaggctcg

SEQ ID NO: 39472 - DNA, 20 bp, Eggerthella lenta
gagggctcaacccccggccg

SEQ ID NO: 39473 - DNA, 20 bp, Cardiobacterium hominis
tgacatcctaggaacttggc

SEQ ID NO: 39474 - DNA, 20 bp, Pseudoramibacter alactolyticus
ggagtaaagccttatattat

SEQ ID NO: 39475 - DNA, 20 bp, Bacteroides capilosus
gtgctggagaggcaatcgga

SEQ ID NO: 39476 - DNA, 20 bp, Streptococcus dysgalactiae
cagtggctcaaccactgtac

SEQ ID NO: 39477 - DNA, 20 bp, Clostridium cadaveris
cgatacctctgtgccgccgt

SEQ ID NO: 39478 - DNA, 20 bp, Propionibacterium avidum
gtggcctaacctgtgtgggg

SEQ ID NO: 39479 - DNA, 20 bp, Clostridium sordellii
aagcttttggaactgtagga

SEQ ID NO: 39480 - DNA, 20 bp, Clostridium histolyticum
cgatgaagttcccttcgggg

SEQ ID NO: 39481 - DNA, 20 bp, Microbacterium terregens
gaacggtgaaagagagcttg

SEQ ID NO: 39482 - DNA, 20 bp, Listeria welshimeri
gcgcatgccacggctttgaa

SEQ ID NO: 39483 - DNA, 20 bp, Pasteurella aerogenes
cagctagagtattttaggga

SEQ ID NO: 39484 - DNA, 20 bp, Clostridium tetani
tccaaccttctgtgccgcag

SEQ ID NO: 39485 - DNA, 20 bp, Corynebacterium glucuronolyticum
accgcatcgtggttggtgtg

SEQ ID NO: 39486 - DNA, 20 bp, Prevotella intermedia
aagacggcctaatacccgat

SEQ ID NO: 39487 - DNA, 20 bp, Bacillus sp
ggatccatggctcaggacga

SEQ ID NO: 39488 - DNA, 20 bp, Bacteroides fragilis
gtggaatgatgtggaaacat

SEQ ID NO: 39489 - DNA, 20 bp, Clostridium innocuum
tcataaaggtcgtctcagtt

SEQ ID NO: 39490 - DNA, 20 bp, Haemophilus segnis
acagagggcgacgaagccgc

SEQ ID NO: 39491 - DNA, 20 bp, Cellulosimicrobium cellulans
ccgccttcgcatgggggtgg

SEQ ID NO: 39492 - DNA, 20 bp, Enterococcus raffinosus
gcgtaagtaactgtgcgcac

SEQ ID NO: 39493 - DNA, 20 bp, Clostridium tetani
caaagaggggaatagccctc

SEQ ID NO: 39494 - DNA, 20 bp, Acinetobacter genospecies 3
ctggttagctagagtgtggg

SEQ ID NO: 39495 - DNA, 20 bp, Weeksella virosa
atattggacaatgggttagc

SEQ ID NO: 39496 - DNA, 20 bp, Lactococcus lactis
taaacataagttttaagttt

SEQ ID NO: 39497 - DNA, 20 bp, Cardiobacterium hominis
gcaggcggttgcccaagtca

SEQ ID NO: 39498 - DNA, 20 bp, Streptococcus constellatus
agaacgcacaggatgcaccg

SEQ ID NO: 39499 - DNA, 20 bp, Brevibacillus agri
tgatctgaaaagaaaagatg

SEQ ID NO: 39500 - DNA, 20 bp, Weissella paramesenteroides
ccgtataataccaacaaccg

SEQ ID NO: 39501 - DNA, 20 bp, Anaerobiospirillum succiniciproducens
gggcatgtaggcggaaaggt

SEQ ID NO: 39502 - DNA, 20 bp, Brochothrix campestris
ttcggctgtcactgtgagat

SEQ ID NO: 39503 - DNA, 20 bp, Enterococcus raffinosus
cgcatggtttctatttgaaa

SEQ ID NO: 39504 - DNA, 20 bp, Clostridium glycolicum
cctcatacacatggataaca

SEQ ID NO: 39505 - DNA, 20 bp, Corynebacterium xerosis
taggaccgcaccgtgagggt

SEQ ID NO: 39506 - DNA, 20 bp, Comamonas testosteroni
tactagagcggctgatggca

SEQ ID NO: 39507 - DNA, 20 bp, Bacillus sp
aagccgtgaggccaagcaaa

SEQ ID NO: 39508 - DNA, 20 bp, Clostridium clostridiiforme
agacggttaagcaagtctga

SEQ ID NO: 39509 - DNA, 20 bp, Anaerococcus prevotii
caaacctcaaaaagtctttc

SEQ ID NO: 39510 - DNA, 20 bp, Gemella bergeri
aagaaaggttgtgtagtaac

SEQ ID NO: 39511 - DNA, 20 bp, Campylobacter sputorum
gaaactatctatctagagta

SEQ ID NO: 39512 - DNA, 20 bp, Myroides odoratus
cagctaccaggcaactggat

SEQ ID NO: 39513 - DNA, 20 bp, Propionibacterium avidum
ctaataccggataggaatcc

SEQ ID NO: 39514 - DNA, 20 bp, Brevibacillus choshinensis
tgcgcgaatcccttaaaacc

SEQ ID NO: 39515 - DNA, 20 bp, Lactococcus lactis
acggtaactacccagaaagg

SEQ ID NO: 39516 - DNA, 20 bp, Bacillus lentus
agcaagcttcttattggttc

SEQ ID NO: 39517 - DNA, 20 bp, Corynebacterium urealyticum
ataggaccaatctttagtgt

SEQ ID NO: 39518 - DNA, 20 bp, Bacteroides uniformis
ggcagctacacggcgacgtg

SEQ ID NO: 39519 - DNA, 20 bp, Campylobacter sputorum
atgggatgaggctatattgt

SEQ ID NO: 39520 - DNA, 20 bp, Prevotella intermedia
tgtaggcggtctgttaagcg

SEQ ID NO: 39521 - DNA, 20 bp, Gemella morbillorum
tttttctggtgcttgcacta

SEQ ID NO: 39522 - DNA, 20 bp, Prevotella disiens
tgaaatgtagatgctcaaca

SEQ ID NO: 39523 - DNA, 20 bp, Actinomyces turicensis
tctttgggataacggtcgga

SEQ ID NO: 39524 - DNA, 20 bp, Fusobacterium mortiferum
atattatgtgagtttcgcat

SEQ ID NO: 39525 - DNA, 20 bp, Tissierella praeacuta
tcacggctcaaccgtggtaa

SEQ ID NO: 39526 - DNA, 20 bp, Neisseria weaveri
gttaacaaggtagccgtagg

SEQ ID NO: 39527 - DNA, 20 bp, Streptococcus agalactiae
aacgctgaggtttggtgttt

SEQ ID NO: 39528 - DNA, 20 bp, Veillonella atypica
caagtcgaacgaagagcgat

SEQ ID NO: 39529 - DNA, 20 bp, Bacillus lentus
caggcggaaagataatctat

SEQ ID NO: 39530 - DNA, 20 bp, Facklamia sourekii
gagataggtgaaatcctacg

SEQ ID NO: 39531 - DNA, 20 bp, Facklamia ignava
acggcctaccgtggctttga

SEQ ID NO: 39532 - DNA, 20 bp, Facklamia hominis
gctagagtaactgttagcgg

SEQ ID NO: 39533 - DNA, 20 bp, Bacteroides fragilis
ccctttactcggggatagcc

SEQ ID NO: 39534 - DNA, 20 bp, Comamonas testosteroni
gggccttgtgctactagagc

SEQ ID NO: 39535 - DNA, 20 bp, Brevibacillus choshinensis
caagtcgagcggaccaatga

SEQ ID NO: 39536 - DNA, 20 bp, Streptococcus anginosus
gagaatggaaagttcatact

SEQ ID NO: 39537 - DNA, 20 bp, Clostridium subterminale
acgctggcggcgtgcctaac

SEQ ID NO: 39538 - DNA, 20 bp, Actinomyces bovis
gggagcgcaggcggtttatc

SEQ ID NO: 39539 - DNA, 20 bp, Alicyclobacillus acidocaldarius
ccagacttgctcgaccgcct

SEQ ID NO: 39540 - DNA, 20 bp, Veillonella atypica
taacgcgtaatcaacctgcc

SEQ ID NO: 39541 - DNA, 20 bp, Corynebacterium glucuronolyticum
tataggaccgcatcgtggtt

SEQ ID NO: 39542 - DNA, 20 bp, Helcococcus ovis
ctgtccttagtgaagataat

SEQ ID NO: 39543 - DNA, 20 bp, Moraxella osloensis
acccattagattagacgtta

SEQ ID NO: 39544 - DNA, 20 bp, Streptococcus gordonii
aattattgcatgataattaa

SEQ ID NO: 39545 - DNA, 20 bp, Nocardia asteroides
aggttgcttcggtaactgac

SEQ ID NO: 39546 - DNA, 20 bp, Corynebacterium urealyticum
gataggaccaatctttagtg

SEQ ID NO: 39547 - DNA, 20 bp, Dietzia maris
tcgtttgtgaaaacccgggg

SEQ ID NO: 39548 - DNA, 20 bp, Prevotella melaninogenica
ctggtatcagcggctaagcg

SEQ ID NO: 39549 - DNA, 20 bp, Corynebacterium jeikeium
aggtgtgggggttttattta

SEQ ID NO: 39550 - DNA, 20 bp, Bacteroides uniformis
ccaagccttcgatggatagg

SEQ ID NO: 39551 - DNA, 20 bp, Bacteroides uniformis
aactattaaagaatttcggt

SEQ ID NO: 39552 - DNA, 20 bp, Propionibacterium freudenreichii
catgtactggaagcgttcag

SEQ ID NO: 39553 - DNA, 20 bp, Facklamia sourekii
cagtgctggcgttaacgcaa

SEQ ID NO: 39554 - DNA, 20 bp, Bacillus sp
tatctctagggccgtcagag

SEQ ID NO: 39555 - DNA, 20 bp, Actinomyces meyeri
agacgtgcgtgcatttggtt

SEQ ID NO: 39556 - DNA, 20 bp, Bacteroides uniformis
gtaggcggacgcttaagtca

SEQ ID NO: 39557 - DNA, 20 bp, Leptotrichia buccalis
taacacatgcaagtctttgg

SEQ ID NO: 39558 - DNA, 20 bp, Bacteroides thetaiotaomicron
ggggcagcatttcagtttgc

SEQ ID NO: 39559 - DNA, 20 bp, Moraxella osloensis
gagtgtaggtggctcattaa

SEQ ID NO: 39560 - DNA, 20 bp, Helcococcus ovis
aattttttaattaatttctt

SEQ ID NO: 39561 - DNA, 20 bp, Micrococcus luteus
ggataggagcgcccaccgca

SEQ ID NO: 39562 - DNA, 20 bp, Prevotella denticola
gtaatgcaaattgcatccaa

SEQ ID NO: 39563 - DNA, 20 bp, Pediococcus pentosaceus
gaacgaacttccgttaattg

SEQ ID NO: 39564 - DNA, 20 bp, Staphylococcus aureus
tggttaattcgaagcaacgc

SEQ ID NO: 39565 - DNA, 20 bp, Actinomyces naeslundii
gagacggggtttcctccttg

SEQ ID NO: 39566 - DNA, 20 bp, Tetragenococcus halophilus
ggcgctttacagcgtcactg

SEQ ID NO: 39567 - DNA, 20 bp, Burkholderia gladioli
atccttcggggatgacggta

SEQ ID NO: 39568 - DNA, 20 bp, Oligella ureolytica
gttgaggaataagcaccggc

SEQ ID NO: 39569 - DNA, 20 bp, Aerococcus urinae
ttggagagtaactgctccag

SEQ ID NO: 39570 - DNA, 20 bp, Bacteroides thetaiotaomicron
ttcagtttgcttgcaaactg

SEQ ID NO: 39571 - DNA, 20 bp, Peptostreptococcus anaerobius
aagtttactaatacatgata

SEQ ID NO: 39572 - DNA, 20 bp, Pseudoramibacter alactolyticus
gccttatattatggttttgt

SEQ ID NO: 39573 - DNA, 20 bp, Moraxella osloensis
agcgagtgtaggtggctcat

SEQ ID NO: 39574 - DNA, 20 bp, Actinomyces naeslundii
gagacggggtttcctccttt

SEQ ID NO: 39575 - DNA, 20 bp, Haemophilus haemolyticus
ggcgaaactgcgaggtggag

SEQ ID NO: 39576 - DNA, 20 bp, Moraxella osloensis
aatatgtgagagggaagtag

SEQ ID NO: 39577 - DNA, 20 bp, Pseudoramibacter alactolyticus
acgagcctagagataggaag

SEQ ID NO: 39578 - DNA, 20 bp, Bacillus coagulans
cagatagttttttcctccgc

SEQ ID NO: 39579 - DNA, 20 bp, Corynebacterium jeikeium
ttgcttgcaaggggtactcg

SEQ ID NO: 39580 - DNA, 20 bp, Bacteroides ovatus
agttgaaactggcagtcttg

SEQ ID NO: 39581 - DNA, 20 bp, Pasteurella multocida
ctcttggccacctgccataa

SEQ ID NO: 39582 - DNA, 20 bp, Bacteroides stercoris
gcagctacacggcgacgtgg

SEQ ID NO: 39583 - DNA, 20 bp, Campylobacter sputorum
gagatagaagtttccccttc

SEQ ID NO: 39584 - DNA, 20 bp, Moraxella osloensis
agggggcgcaagctcttgct

SEQ ID NO: 39585 - DNA, 20 bp, Clostridium ramosum
ggtagaggatggacttatgg

SEQ ID NO: 39586 - DNA, 20 bp, Anaerococcus prevotii
cttaagtggattagtggcgg

SEQ ID NO: 39587 - DNA, 20 bp, Oligella ureolytica
taaaccacttttctcaacga

SEQ ID NO: 39588 - DNA, 20 bp, Eggerthella lenta
acgatgaaaccgccctcggg

SEQ ID NO: 39589 - DNA, 20 bp, Pasteurella aerogenes
tcctttgttgccagcacatt

SEQ ID NO: 39590 - DNA, 20 bp, Streptococcus constellatus
gcaccgtagtttactacacc

SEQ ID NO: 39591 - DNA, 20 bp, Bacteroides thetaiotaomicron
gtcttgttattaaagaattt

SEQ ID NO: 39592 - DNA, 20 bp, Cardiobacterium hominis
ctttctgggtcgatactgac

SEQ ID NO: 39593 - DNA, 20 bp, Anaerobiospirillum succiniciproducens
tcagagataagagagtgcct

SEQ ID NO: 39594 - DNA, 20 bp, Arcanobacterium bernardiae
ggttgagggtatgtgcagaa

SEQ ID NO: 39595 - DNA, 20 bp, Anaerobiospirillum succiniciproducens
ccgtgaggtggagtggaacc

SEQ ID NO: 39596 - DNA, 20 bp, Comamonas testosteroni
cgaaaagcctggggctaata

SEQ ID NO: 39597 - DNA, 20 bp, Propionibacterium avidum
gttgattgcgtcggaagtga

SEQ ID NO: 39598 - DNA, 20 bp, Paenibacillus thiaminolyticus
tcacggaaacgtgggctaat

SEQ ID NO: 39599 - DNA, 20 bp, Streptococcus gordonii
tataccgtagcttgctacac

SEQ ID NO: 39600 - DNA, 20 bp, Fusobacterium varium
cttcggaggaacttggtgac

SEQ ID NO: 39601 - DNA, 20 bp, Propionibacterium freudenreichii
aggggagaatggaactctcg

SEQ ID NO: 39602 - DNA, 20 bp, Acinetobacter calcoaceticus
ctactgaagttaataccttc

SEQ ID NO: 39603 - DNA, 20 bp, Kocuria kristinae
acatacaccggatcgttcca

SEQ ID NO: 39604 - DNA, 20 bp, Chromobacterium violaceum
gcagccgacgtctgattagc

SEQ ID NO: 39605 - DNA, 20 bp, Arcanobacterium haemolyticum
taactccggggctgcagtgg

SEQ ID NO: 39606 - DNA, 20 bp, Leptotrichia buccalis
ctggaaactgtttggctaga

SEQ ID NO: 39607 - DNA, 20 bp, Paenibacillus peoriae
ttgcttctaaacaacctagc

SEQ ID NO: 39608 - DNA, 20 bp, Leuconostoc lactis
aaacctaacaccgcatggtg

SEQ ID NO: 39609 - DNA, 20 bp, Propionibacterium freudenreichii
taggggagaatggaactctc

SEQ ID NO: 39610 - DNA, 20 bp, Corynebacterium afermentans
atagagaccttgcggggcga

SEQ ID NO: 39611 - DNA, 20 bp, Clostridium ramosum
caactgacgctcagtcccga

SEQ ID NO: 39612 - DNA, 20 bp, Neisseria weaveri
ggaagaaaaggttgtggcta

SEQ ID NO: 39613 - DNA, 20 bp, Pasteurella trehalosi
ttgtttaatagacaaagcaa

SEQ ID NO: 39614 - DNA, 20 bp, Gemella bergeri
tagggacaaagagaagcgaa

SEQ ID NO: 39615 - DNA, 20 bp, Propionibacterium freudenreichii
tactggaagcgttcagagat

SEQ ID NO: 39616 - DNA, 20 bp, Clostridium clostridiiforme
tggataacctgcctcacact

SEQ ID NO: 39617 - DNA, 20 bp, Neisseria lactamica
cgggcagtgggggataactg

SEQ ID NO: 39618 - DNA, 20 bp, Gemella morbillorum
ggtgcttgcactagaaaaac

SEQ ID NO: 39619 - DNA, 20 bp, Stenotrophomonas maltophilia
tgccttcgggagcgctgagc

SEQ ID NO: 39620 - DNA, 20 bp, Enterobacter gergoviae
ggagtgaggttaataacctc

SEQ ID NO: 39621 - DNA, 20 bp, Bacteroides merdae
cgaaagtcggattaataccc

SEQ ID NO: 39622 - DNA, 20 bp, Brevibacillus choshinensis
gtgctaggtgttggggactc

SEQ ID NO: 39623 - DNA, 20 bp, Alcaligenes faecalis
taaagtacttttggcagaga

SEQ ID NO: 39624 - DNA, 20 bp, Bacteroides stercoris
ctacacggcgacgtggtgct

SEQ ID NO: 39625 - DNA, 20 bp, Vibrio cholerae
agtactctagcttgtcagtt

SEQ ID NO: 39626 - DNA, 20 bp, Corynebacterium group F
gtcgtttgtgtaagtccaca

SEQ ID NO: 39627 - DNA, 20 bp, Tissierella praeacuta
aatgtcgcatgagatttaag

SEQ ID NO: 39628 - DNA, 20 bp, Anaerococcus tetradius
tgatttagaaggccttcggg

SEQ ID NO: 39629 - DNA, 20 bp, Facklamia ignava
cgcaaacgcaataaacactc

SEQ ID NO: 39630 - DNA, 20 bp, Finegoldia magna
gacatccatacaggtggtgc

SEQ ID NO: 39631 - DNA, 20 bp, Morganella morganii
ttcgggcctcgcaccatcag

SEQ ID NO: 39632 - DNA, 20 bp, Anaerococcus tetradius
acggagggaattagagatag

SEQ ID NO: 39633 - DNA, 20 bp, Comamonas testosteroni
ggcaggaacttaccagagat

SEQ ID NO: 39634 - DNA, 20 bp, Bacteroides uniformis
tgaacttagcttgctaagtt

SEQ ID NO: 39635 - DNA, 20 bp, Yersinia ruckeri
agcactgaacattgacgtta

SEQ ID NO: 39636 - DNA, 20 bp, Corynebacterium afermentans
tactgaccatgcggtcgcag

SEQ ID NO: 39637 - DNA, 20 bp, Lactococcus lactis
ataacaactttaaacataag

SEQ ID NO: 39638 - DNA, 20 bp, Kytococcus sedentarius
catacgtgtaagtaactatg

SEQ ID NO: 39639 - DNA, 20 bp, Haemophilus actinemycetemcomitans
gagatgggtttgtgccttag

SEQ ID NO: 39640 - DNA, 20 bp, Streptococcus infantarius
aaactttagcaagctaagtt

SEQ ID NO: 39641 - DNA, 20 bp, Paenibacillus thiaminolyticus
cataggtgacggtacctgag

SEQ ID NO: 39642 - DNA, 20 bp, Leuconostoc pseudomesenteroides
aggcgctttggcgtcaccta

SEQ ID NO: 39643 - DNA, 20 bp, Peptostreptococcus anaerobius
caaagtgttagcggtatagg

SEQ ID NO: 39644 - DNA, 20 bp, Anaerococcus tetradius
aactgctcatcttgaggtat

SEQ ID NO: 39645 - DNA, 20 bp, Tetragenococcus halophilus
tgctttttctatgacggtag

SEQ ID NO: 39646 - DNA, 20 bp, Vibrio mimicus
gaggaaggtggttaagttaa

SEQ ID NO: 39647 - DNA, 20 bp, Tissierella praeacuta
gatcacggctcaaccgtggt

SEQ ID NO: 39648 - DNA, 20 bp, Gemella haemolysans
cgagctcgcgagagtaagca

SEQ ID NO: 39649 - DNA, 20 bp, Staphylococcus condimenti
aatatgcggaaccgcatggt

SEQ ID NO: 39650 - DNA, 20 bp, Staphylococcus sp.
ctttcactatcgaaccatgc

SEQ ID NO: 39651 - DNA, 20 bp, Prevotella melaninogenica
ggatggtgtaatgcaaattg

SEQ ID NO: 39652 - DNA, 20 bp, Lactococcus lactis
aacataagttttaagtttga

SEQ ID NO: 39653 - DNA, 20 bp, Corynebacterium urealyticum
taccggataggaccaatctt

SEQ ID NO: 39654 - DNA, 20 bp, Peptostreptococcus anaerobius
ttatccaaccgcaaggagga

SEQ ID NO: 39655 - DNA, 20 bp, Bacteroides thetaiotaomicron
tggaattttgtatgtaccat

SEQ ID NO: 39656 - DNA, 20 bp, Paenibacillus peoriae
aagtcgagcggggttgttta

SEQ ID NO: 39657 - DNA, 20 bp, Fusobacterium nucleatum
atgtttcagtgtcccttcgg

SEQ ID NO: 39658 - DNA, 20 bp, Listeria monocytogenes
catgccacgcttttgaaaga

SEQ ID NO: 39659 - DNA, 20 bp, Atopobium parvulum
gatgggtagctgggttgaga

SEQ ID NO: 39660 - DNA, 20 bp, Actinomyces radingae
gggtgggcggtcacattggg

SEQ ID NO: 39661 - DNA, 20 bp, Actinomyces bovis
gagatgtgtaatagttatgg

SEQ ID NO: 39662 - DNA, 20 bp, Alcaligenes faecalis
cggcagcgcgagagagcttg

SEQ ID NO: 39663 - DNA, 20 bp, Achromobacter xylosoxidans
gggttaataccccgcggaac

SEQ ID NO: 39664 - DNA, 20 bp, Streptococcus hyovaginalis
agagtggaaagtttactctg

SEQ ID NO: 39665 - DNA, 20 bp, Bacteroides capilosus
taacagtccgaaaggactgc

SEQ ID NO: 39666 - DNA, 20 bp, Leptotrichia buccalis
gaaacgactgataatacctg

SEQ ID NO: 39667 - DNA, 20 bp, Bacteroides thetaiotaomicron
gcaaatgtgaaggtgctgca

SEQ ID NO: 39668 - DNA, 20 bp, Actinomyces turicensis
ttctttgggataacggtcgg

SEQ ID NO: 39669 - DNA, 20 bp, Campylobacter curvus
caaaccggttatggtccaca

SEQ ID NO: 39670 - DNA, 20 bp, Moraxella lacunata
cgttgggtctcttgaagact

SEQ ID NO: 39671 - DNA, 20 bp, Neisseria polysaccharea
gctgttgctaatatcagcgg

SEQ ID NO: 39672 - DNA, 20 bp, Brochothrix campestris
ataatacaaagggtcgcgaa

SEQ ID NO: 39673 - DNA, 20 bp, Bacillus coagulans
tggaggctgttcccctgagg

SEQ ID NO: 39674 - DNA, 20 bp, Lactococcus lactis
gcctttgagcgggggacaac

SEQ ID NO: 39675 - DNA, 20 bp, Actinomyces naeslundii
tctgggtctgtcgcatggtg

SEQ ID NO: 39676 - DNA, 20 bp, Alcaligenes faecalis
acgaggtactgctgacggta

SEQ ID NO: 39677 - DNA, 20 bp, Bacillus sp
ctgatgaagagcttgctttt

SEQ ID NO: 39678 - DNA, 20 bp, Lactococcus lactis
actggatgagcagcgaacgg

SEQ ID NO: 39679 - DNA, 20 bp, Rothia mucilaginosa
atacgtgagtaacctacctt

SEQ ID NO: 39680 - DNA, 20 bp, Facklamia ignava
ggatggtacagcgagaagcg

SEQ ID NO: 39681 - DNA, 20 bp, Myroides odoratus
tatttgacggtaccgtaaga

SEQ ID NO: 39682 - DNA, 20 bp, Actinomyces bovis
taagggaagaacgataggaa

SEQ ID NO: 39683 - DNA, 20 bp, Bacteroides ureolyticus
tgctagtcaaggcagtaatg

SEQ ID NO: 39684 - DNA, 20 bp, Gemella bergeri
gcaggtggtttagaaagtct

SEQ ID NO: 39685 - DNA, 20 bp, Anaerococcus prevotii
gtaaaaggcagtagcttaac

SEQ ID NO: 39686 - DNA, 20 bp, Fusobacterium nucleatum
acagagagtcgcaaagccgt

SEQ ID NO: 39687 - DNA, 20 bp, Peptostreptococcus anaerobius
tcaaagtgttagcggtatag

SEQ ID NO: 39688 - DNA, 20 bp, Gemella haemolysans
gttgttctgacctttggtta

SEQ ID NO: 39689 - DNA, 20 bp, Campylobacter lari
tcttttgtgaaatctaacag

SEQ ID NO: 39690 - DNA, 20 bp, Propionibacterium freudenreichii
tgaggaacgtgcccttgact

SEQ ID NO: 39691 - DNA, 20 bp, Gemella sanguinis
ggctaacactatgagatggc

SEQ ID NO: 39692 - DNA, 20 bp, Neisseria subflava
cagggaagaaaaggataggg

SEQ ID NO: 39693 - DNA, 20 bp, Acinetobacter calcoaceticus
tatcacttagcggcggacgg

SEQ ID NO: 39694 - DNA, 20 bp, Clostridium botulinum
aaaacttataaaacctatct

SEQ ID NO: 39695 - DNA, 20 bp, Moraxella osloensis
gagtctattgcaccagaagt

SEQ ID NO: 39696 - DNA, 20 bp, Cardiobacterium hominis
gcccaagtcagatgtgaaag

SEQ ID NO: 39697 - DNA, 20 bp, Brevibacterium epidermidis
ggaccgttctggaaacagtt

SEQ ID NO: 39698 - DNA, 20 bp, Atopobium parvulum
cacccgagtcgattgcaccc

SEQ ID NO: 39699 - DNA, 20 bp, Abiotrophia defectiva
gttatgcgtgtgacggtatc

SEQ ID NO: 39700 - DNA, 20 bp, Paenibacillus validus
ggatagctggtttctccgca

SEQ ID NO: 39701 - DNA, 20 bp, Facklamia sourekii
ctaataccgcataaacctta

SEQ ID NO: 39702 - DNA, 20 bp, Gemella bergeri
gtagtaactatacacaaaac

SEQ ID NO: 39703 - DNA, 20 bp, Bacteroides stercoris
cggacagttgtgaaggtgct

SEQ ID NO: 39704 - DNA, 20 bp, Staphylococcus aureus
ggatccgcgctgcattagct

SEQ ID NO: 39705 - DNA, 20 bp, Enterococcus raffinosus
aagctaatgccggataacat

SEQ ID NO: 39706 - DNA, 20 bp, Kingella denitrificans
taacatattggaatgtaccg

SEQ ID NO: 39707 - DNA, 20 bp, Anaerococcus tetradius
ctttctggccataaactgac

SEQ ID NO: 39708 - DNA, 20 bp, Gemella haemolysans
gttagggaagaatgattgtg

SEQ ID NO: 39709 - DNA, 20 bp, Peptostreptococcus anaerobius
cgaaggtggcgtcgataact

SEQ ID NO: 39710 - DNA, 20 bp, Lactococcus lactis
cttgtaccgactggatgagc

SEQ ID NO: 39711 - DNA, 20 bp, Anaerococcus prevotii
cctgccttagacattgggat

SEQ ID NO: 39712 - DNA, 20 bp, Pediococcus inopinatus
cttcgggagctagccgtcta

SEQ ID NO: 39713 - DNA, 20 bp, Lactococcus garvieae
aaagtaggttgcctaaccgc

SEQ ID NO: 39714 - DNA, 20 bp, Bacteroides vulgatus
gccgcaaggcatctgtgaag

SEQ ID NO: 39715 - DNA, 20 bp, Ignavigranum ruoffiae
cagcgacctcgtgagagcaa

SEQ ID NO: 39716 - DNA, 20 bp, Streptococcus acidominimus
acatttaaaaggtgcaactg

SEQ ID NO: 39717 - DNA, 20 bp, Anaerococcus prevotii
actactgtaagcatttgaaa

SEQ ID NO: 39718 - DNA, 20 bp, Peptostreptococcus anaerobius
ctaagcttgacatcccttag

SEQ ID NO: 39719 - DNA, 20 bp, Campylobacter coli
tgtacactagttgttggggt

SEQ ID NO: 39720 - DNA, 20 bp, Arcanobacterium haemolyticum
atattctgcttctgccgcat

SEQ ID NO: 39721 - DNA, 20 bp, Moraxella osloensis
gtgtaggtggctcattaagt

SEQ ID NO: 39722 - DNA, 20 bp, Lactococcus garvieae
gtaagaccgatgactggggt

SEQ ID NO: 39723 - DNA, 20 bp, Moraxella lacunata
taccagcgatttaagtcggg

SEQ ID NO: 39724 - DNA, 20 bp, Bacillus sp
caaatcccacaaaaccattc

SEQ ID NO: 39725 - DNA, 20 bp, Eggerthella lenta
ctcgagttcggtagaggcag

SEQ ID NO: 39726 - DNA, 20 bp, Acinetobacter haemolyticus
aagtcgagcggggaagtgta

SEQ ID NO: 39727 - DNA, 20 bp, Leptotrichia buccalis
gccagacaagtctggggtga

SEQ ID NO: 39728 - DNA, 20 bp, Lactococcus garvieae
tgcgctaatctcttaaaacc

SEQ ID NO: 39729 - DNA, 20 bp, Alicyclobacillus acidocaldarius
cgagcggctttttgggtttc

SEQ ID NO: 39730 - DNA, 20 bp, Abiotrophia defectiva
cagcgcatagagtaactgtt

SEQ ID NO: 39731 - DNA, 20 bp, Bacteroides thetaiotaomicron
gtcgaggggcagcatttcag

SEQ ID NO: 39732 - DNA, 20 bp, Bacillus simplex
cgcatgagagaagatggaaa

SEQ ID NO: 39733 - DNA, 20 bp, Clostridium innocuum
gctggagtgcagaagagggc

SEQ ID NO: 39734 - DNA, 20 bp, Aerococcus viridans
atggaagaagattgaaagac

SEQ ID NO: 39735 - DNA, 20 bp, Gemella sanguinis
agaatgattgtatagtaact

SEQ ID NO: 39736 - DNA, 20 bp, Lactococcus garvieae
aaggagggcgcttcctaagg

SEQ ID NO: 39737 - DNA, 20 bp, Facklamia ignava
ttcagcgggggataaccatc

SEQ ID NO: 39738 - DNA, 20 bp, Bacteroides ureolyticus
aatagctaccttccacagtg

SEQ ID NO: 39739 - DNA, 20 bp, Clostridium clostridiiforme
tcggagcaatggagacaggt

SEQ ID NO: 39740 - DNA, 20 bp, Staphylococcus capitis
cctcccttgtggtttgtata

SEQ ID NO: 39741 - DNA, 20 bp, Actinomyces radingae
tgggcggtcacattgggact

SEQ ID NO: 39742 - DNA, 20 bp, Streptococcus porcinus
agtagaagacccatgtcatc

SEQ ID NO: 39743 - DNA, 20 bp, Brevibacillus agri
tcgcatgatctgaaaagaaa

SEQ ID NO: 39744 - DNA, 20 bp, Prevotella denticola
atccaaccttcccattactg

SEQ ID NO: 39745 - DNA, 20 bp, Gemella bergeri
cgcgcaggtggtttagaaag

SEQ ID NO: 39746 - DNA, 20 bp, Gemella bergeri
ttggtctcaaaagagatcag

SEQ ID NO: 39747 - DNA, 20 bp, Haemophilus segnis
atttagtttaatagactagg

SEQ ID NO: 39748 - DNA, 20 bp, Campylobacter curvus
accggttatggtccacagtg

SEQ ID NO: 39749 - DNA, 20 bp, Anaerococcus tetradius
taaaactgctcatcttgagg

SEQ ID NO: 39750 - DNA, 20 bp, Bacillus oleronius
cttttttcttcgcatgaggg

SEQ ID NO: 39751 - DNA, 20 bp, Bacteroides uniformis
ggtgtcttgagtacagtaga

SEQ ID NO: 39752 - DNA, 20 bp, Streptococcus constellatus
gtattctgtgagttgcgaac

SEQ ID NO: 39753 - DNA, 20 bp, Clostridium tetani
taggcggatgcttaagtgag

SEQ ID NO: 39754 - DNA, 20 bp, Veillonella atypica
cagtctgtcttaaaagttcg

SEQ ID NO: 39755 - DNA, 20 bp, Pediococcus dextrinicus
agtaacccgtaagggagcta

SEQ ID NO: 39756 - DNA, 20 bp, Campylobacter curvus
gagctagtcttggcagtaat

SEQ ID NO: 39757 - DNA, 20 bp, Veillonella atypica
tgatctagagtatcggagag

SEQ ID NO: 39758 - DNA, 20 bp, Vibrio cholerae
tacagtactctagcttgtca

SEQ ID NO: 39759 - DNA, 20 bp, Anaerobiospirillum succiniciproducens
cttacctgaccttgacatcg

SEQ ID NO: 39760 - DNA, 20 bp, Bacteroides capilosus
gcctgcatttgaaactgtag

SEQ ID NO: 39761 - DNA, 20 bp, Haemophilus segnis
ggaagcgagagtgcgagctg

SEQ ID NO: 39762 - DNA, 20 bp, Veillonella atypica
tgggatggaaactgctgatc

SEQ ID NO: 39763 - DNA, 20 bp, Brochothrix campestris
acatcataagatgttcaagt

SEQ ID NO: 39764 - DNA, 20 bp, Chromobacterium violaceum
gggtgcttgcaccgctgacg

SEQ ID NO: 39765 - DNA, 20 bp, Prevotella melaninogenica
gatggtgtaatgcaaattgc

SEQ ID NO: 39766 - DNA, 20 bp, Haemophilus actinemycetemcomitans
gtgatgaggaaggttggtgt

SEQ ID NO: 39767 - DNA, 20 bp, Streptococcus agalactiae
cgctgaggtttggtgtttac

SEQ ID NO: 39768 - DNA, 20 bp, Prevotella loescheii
gatacgcgaggaaccttacc

SEQ ID NO: 39769 - DNA, 20 bp, Veillonella atypica
aacgaagagcgatggaagct

SEQ ID NO: 39770 - DNA, 20 bp, Weeksella virosa
gttttgaaagatttatcgct

SEQ ID NO: 39771 - DNA, 20 bp, Clostridium ramosum
tggtgcagagggaagcgaag

SEQ ID NO: 39772 - DNA, 20 bp, Propionibacterium freudenreichii
tttggctggtacacaggtgg

SEQ ID NO: 39773 - DNA, 20 bp, Streptococcus thermophilus
aacctgccttgtagcggggg

SEQ ID NO: 39774 - DNA, 20 bp, Helcococcus ovis
gctagttgtcgggagtcaaa

SEQ ID NO: 39775 - DNA, 20 bp, Propionibacterium propionicus
catgacgaagcttttgtgac

SEQ ID NO: 39776 - DNA, 20 bp, Listeria ivanovii
gctaataccgaatgataagt

SEQ ID NO: 39777 - DNA, 20 bp, Arcanobacterium bernardiae
tggaaagggtttctggatag

SEQ ID NO: 39778 - DNA, 20 bp, Anaerococcus prevotii
tgagatgttcagttaagtct

SEQ ID NO: 39779 - DNA, 20 bp, Alicyclobacillus acidocaldarius
ccagcactcaagtcaagcag

SEQ ID NO: 39780 - DNA, 20 bp, Micromonas micros
gggtcaaagatttatcggtg

SEQ ID NO: 39781 - DNA, 20 bp, Eggerthella lenta
gcgcgtaggcggcctctcaa

SEQ ID NO: 39782 - DNA, 20 bp, Bacillus coagulans
ggaggaaaaaggaaaggcgg

SEQ ID NO: 39783 - DNA, 20 bp, Aerococcus viridans
agaagaggaatgtggaactc

SEQ ID NO: 39784 - DNA, 20 bp, Clostridium butyricum
acaatgagatgcaacctcgc

SEQ ID NO: 39785 - DNA, 20 bp, Finegoldia magna
cctatgacagtgggatagcc

SEQ ID NO: 39786 - DNA, 20 bp, Actinomyces neuii
ttgggtggggactcgtgaga

SEQ ID NO: 39787 - DNA, 20 bp, Vagococcus fluvialis
aatcaaagagtggcggacgg

SEQ ID NO: 39788 - DNA, 20 bp, Prevotella loescheii
agtcggactaataccgtatg

SEQ ID NO: 39789 - DNA, 20 bp, Bacteroides forsythus
tacctcataaaacaggggtt

SEQ ID NO: 39790 - DNA, 20 bp, Corynebacterium glucuronolyticum
ggcttgacatatgtgagatt

SEQ ID NO: 39791 - DNA, 20 bp, Micrococcus luteus
ggagcgcccaccgcatggtg

SEQ ID NO: 39792 - DNA, 20 bp, Atopobium parvulum
gagaccgaccagccagattg

SEQ ID NO: 39793 - DNA, 20 bp, Propionibacterium avidum
ttgacatggactgggagtgc

SEQ ID NO: 39794 - DNA, 20 bp, Peptostreptococcus anaerobius
gctcaaccgtagttagcctc

SEQ ID NO: 39795 - DNA, 20 bp, Facklamia ignava
tggtacagcgagaagcgacg

SEQ ID NO: 39796 - DNA, 20 bp, Sporosarcina ureae
aatggacgatacagagggct

SEQ ID NO: 39797 - DNA, 20 bp, Neisseria polysaccharea
gataccagaagtgggtagga

SEQ ID NO: 39798 - DNA, 20 bp, Rhizobium radiobacter
ggtttgggcagtggagacat

SEQ ID NO: 39799 - DNA, 20 bp, Streptococcus agalactiae
actagactgatgagttgcga

SEQ ID NO: 39800 - DNA, 20 bp, Bacteroides fragilis
ctaatcccaaaatcctctct

SEQ ID NO: 39801 - DNA, 20 bp, Bacillus psychrosaccharolyticus
ggaacccagtggcgaaggcg

SEQ ID NO: 39802 - DNA, 20 bp, Streptococcus suis
ctgttgtaagagaagaactg

SEQ ID NO: 39803 - DNA, 20 bp, Bacteroides capilosus
gtgtaggcgggactgcaagt

SEQ ID NO: 39804 - DNA, 20 bp, Bacteroides ureolyticus
ttgctagtcaaggcagtaat

SEQ ID NO: 39805 - DNA, 20 bp, Morganella morganii
tatacaaagggaagcgaccc

SEQ ID NO: 39806 - DNA, 20 bp, Haemophilus paraphrophilus
aggaaggttgttgtgtgaat

SEQ ID NO: 39807 - DNA, 20 bp, Prevotella intermedia
aacgtatgcggaattcatgg

SEQ ID NO: 39808 - DNA, 20 bp, Shewanella algae
ttgcgctgatggataagccc

SEQ ID NO: 39809 - DNA, 20 bp, Bacteroides merdae
tgaaagtttgtggctcaacc

SEQ ID NO: 39810 - DNA, 20 bp, Capnocytophaga sp.
cgaaggcatattactaacaa

SEQ ID NO: 39811 - DNA, 20 bp, Corynebacterium glucuronolyticum
atatgtgagattgggctaga

SEQ ID NO: 39812 - DNA, 20 bp, Streptococcus constellatus
gttgttaaggaagaacgtgt

SEQ ID NO: 39813 - DNA, 20 bp, Pseudomonas fluorescens
cgtgagtattttgacgttac

SEQ ID NO: 39814 - DNA, 20 bp, Suttonella indologenes
aacgtatggaaacgtacgct

SEQ ID NO: 39815 - DNA, 20 bp, Peptostreptococcus anaerobius
tagaccggtgtttaatcaca

SEQ ID NO: 39816 - DNA, 20 bp, Stenotrophomonas maltophilia
tggatgactagaatgtggta

SEQ ID NO: 39817 - DNA, 20 bp, Acinetobacter radioresistens
gattaatactttaggatagt

SEQ ID NO: 39818 - DNA, 20 bp, Paenibacillus peoriae
gtttagaagcttgcttctaa

SEQ ID NO: 39819 - DNA, 20 bp, Collinsella aerofaciens
gggtaataccggataccccg

SEQ ID NO: 39820 - DNA, 20 bp, Campylobacter concisus
gtgacggtacgtgcagaaga

SEQ ID NO: 39821 - DNA, 20 bp, Clostridium septicum
aagtcgagcgaggggagttt

SEQ ID NO: 39822 - DNA, 20 bp, Streptococcus anginosus
aggaagaacgagtgtgagaa

SEQ ID NO: 39823 - DNA, 20 bp, Neisseria polysaccharea
atcagcggctgatgacggta

SEQ ID NO: 39824 - DNA, 20 bp, Actinomyces naeslundii
ataaccgcatgaaagtgtgg

SEQ ID NO: 39825 - DNA, 20 bp, Streptococcus constellatus
tgcaccgtagtttactacac

SEQ ID NO: 39826 - DNA, 20 bp, Campylobacter curvus
aaaccggttatggtccacag

SEQ ID NO: 39827 - DNA, 20 bp, Tissierella praeacuta
atgacacttaaatgtcgcat

SEQ ID NO: 39828 - DNA, 20 bp, Acinetobacter genospecies 3
aactgcaaagagggcggtta

SEQ ID NO: 39829 - DNA, 20 bp, Campylobacter coli
actagttgttggggtgctag

SEQ ID NO: 39830 - DNA, 20 bp, Fusobacterium nucleatum
tgcctcacagatagggacaa

SEQ ID NO: 39831 - DNA, 20 bp, Streptococcus bovis
gaacgctgactactttagct

SEQ ID NO: 39832 - DNA, 20 bp, Alcaligenes faecalis
tgtgtaggcggttcggaaag

SEQ ID NO: 39833 - DNA, 20 bp, Bacteroides fragilis
gcatggtttcattattaaag

SEQ ID NO: 39834 - DNA, 20 bp, Corynebacterium jeikeium
taggtgtgggggttttattt

SEQ ID NO: 39835 - DNA, 20 bp, Porphyromonas endodontalis
aagacgcgaggaaggggcgg

SEQ ID NO: 39836 - DNA, 20 bp, Streptococcus infantarius
tagcttgctaaagttggaag

SEQ ID NO: 39837 - DNA, 20 bp, Streptococcus anginosus
accgcataacagtatgtaac

SEQ ID NO: 39838 - DNA, 20 bp, Photobacterium damselae
aacacctgcattatttgacg

SEQ ID NO: 39839 - DNA, 20 bp, Anaerococcus tetradius
gagatagttccttacttctt

SEQ ID NO: 39840 - DNA, 20 bp, Anaerococcus prevotii
aactgtaatacaggtggtgc

SEQ ID NO: 39841 - DNA, 20 bp, Facklamia ignava
cggcctaccgtggctttgat

SEQ ID NO: 39842 - DNA, 20 bp, Clostridium ramosum
gaagcttaacttcagtaagc

SEQ ID NO: 39843 - DNA, 20 bp, Propionibacterium avidum
gactgggagtgctcagagat

SEQ ID NO: 39844 - DNA, 20 bp, Actinomyces naeslundii
ttgtgggggctggttcacag

SEQ ID NO: 39845 - DNA, 20 bp, Paenibacillus peoriae
cggggttgtttagaagcttg

SEQ ID NO: 39846 - DNA, 20 bp, Leptotrichia buccalis
cgtagatatgtgcaggaatg

SEQ ID NO: 39847 - DNA, 20 bp, Fusobacterium nucleatum
acaggtagggacaacatttg

SEQ ID NO: 39848 - DNA, 20 bp, Acinetobacter calcoaceticus
cactatcacttagcggcgga

SEQ ID NO: 39849 - DNA, 20 bp, Corynebacterium glucuronolyticum
ggctagagatagttcgtccc

SEQ ID NO: 39850 - DNA, 20 bp, Listeria innocua
gagtgtggcgcatgccacgc

SEQ ID NO: 39851 - DNA, 20 bp, Prevotella oralis
acccgggcttgaactgccat

SEQ ID NO: 39852 - DNA, 20 bp, Streptococcus equinus
aacagcatttaacacatgtt

SEQ ID NO: 39853 - DNA, 20 bp, Streptococcus hyovaginalis
ccttcggggcactggtgaca

SEQ ID NO: 39854 - DNA, 20 bp, Leuconostoc carnosum
acttagtatcgcatgatacc

SEQ ID NO: 39855 - DNA, 20 bp, Leptotrichia buccalis
tgctgcaggagagctttgcg

SEQ ID NO: 39856 - DNA, 20 bp, Brevibacillus parabrevis
cgaggggacgccaatctctg

SEQ ID NO: 39857 - DNA, 20 bp, Brevibacillus choshinensis
tccgaaaagaaaaggcggct

SEQ ID NO: 39858 - DNA, 20 bp, Clostridium hastiforme
ctggcggcgtgcctaacaca

SEQ ID NO: 39859 - DNA, 20 bp, Campylobacter concisus
ggatgccattgtggaaagtt

SEQ ID NO: 39860 - DNA, 20 bp, Propionibacterium freudenreichii
actggaagcgttcagagatg

SEQ ID NO: 39861 - DNA, 20 bp, Clostridium histolyticum
cgagaatcctgtggaaacat

SEQ ID NO: 39862 - DNA, 20 bp, Veillonella atypica
gggagttaatagacggaagc

SEQ ID NO: 39863 - DNA, 20 bp, Abiotrophia defectiva
tgggtaacctacctcatagt

SEQ ID NO: 39864 - DNA, 20 bp, Neisseria polysaccharea
cagcggctgatgacggtacc

SEQ ID NO: 39865 - DNA, 20 bp, Gemella bergeri
aagaacctgccttatagact

SEQ ID NO: 39866 - DNA, 20 bp, Staphylococcus muscae
ttgaccgcactagagatagt

SEQ ID NO: 39867 - DNA, 20 bp, Burkholderia multivorans
cagtcgggggatgacggtac

SEQ ID NO: 39868 - DNA, 20 bp, Alcaligenes faecalis
gaaaaggtacctcctaatac

SEQ ID NO: 39869 - DNA, 20 bp, Providencia rettgeri
gatttggaggttgttcccta

SEQ ID NO: 39870 - DNA, 20 bp, Bacillus alcalophilus
ccccgaggggtcattggaaa

SEQ ID NO: 39871 - DNA, 20 bp, Bacteroides stercoris
gtggtgctaatcccgaaagc

SEQ ID NO: 39872 - DNA, 20 bp, Aerococcus christensenii
ggtacaacgggcagcgagct

SEQ ID NO: 39873 - DNA, 20 bp, Actinomyces naeslundii
gataaccgcatgaaagtgtg

SEQ ID NO: 39874 - DNA, 20 bp, Streptococcus constellatus
aagaacatttactgcatggt

SEQ ID NO: 39875 - DNA, 20 bp, Moraxella  catarrhalis
taccagcgactcggtcggga

SEQ ID NO: 39876 - DNA, 20 bp, Bacillus marinus
tcggggacaatggtgacagg

SEQ ID NO: 39877 - DNA, 20 bp, Moraxella lacunata
agtgagaatcctgcagagat

SEQ ID NO: 39878 - DNA, 20 bp, Helcococcus ovis
aaacttgtatacaggtggtg

SEQ ID NO: 39879 - DNA, 20 bp, Anaerococcus tetradius
agcttttaaaactgctcatc

SEQ ID NO: 39880 - DNA, 20 bp, Actinomyces turicensis
cagctttgggttgtggtgag

SEQ ID NO: 39881 - DNA, 20 bp, Campylobacter curvus
gcccaaataccaaaccggtt

SEQ ID NO: 39882 - DNA, 20 bp, Anaerococcus tetradius
gctcatcttgaggtatggaa

SEQ ID NO: 39883 - DNA, 20 bp, Prevotella intermedia
aaaagccatgcgactctcat

SEQ ID NO: 39884 - DNA, 20 bp, Shewanella algae
cgctgatggataagcccagg

SEQ ID NO: 39885 - DNA, 20 bp, Pseudoramibacter alactolyticus
aaagccttatattatggttt

SEQ ID NO: 39886 - DNA, 20 bp, Acinetobacter genospecies 3
aggcggctaattaagtcaaa

SEQ ID NO: 39887 - DNA, 20 bp, Porphyromonas levii
gatacctttttcttcggaca

SEQ ID NO: 39888 - DNA, 20 bp, Paenibacillus peoriae
gcttctaaacaacctagcgg

SEQ ID NO: 39889 - DNA, 20 bp, Atopobium parvulum
ggcggaaacgtcgtggccga

SEQ ID NO: 39890 - DNA, 20 bp, Pediococcus inopinatus
tcggacgcactttcgttgaa

SEQ ID NO: 39891 - DNA, 20 bp, Haemophilus paraphrophilus
tgacgaggaaggttgttgtg

SEQ ID NO: 39892 - DNA, 20 bp, Bacteroides fragilis
tcttttatataagaataaag

SEQ ID NO: 39893 - DNA, 20 bp, Corynebacterium glucuronolyticum
gtggagctaatcgcgaaagc

SEQ ID NO: 39894 - DNA, 20 bp, Lactococcus lactis
agatgatcccgcgttgtatt

SEQ ID NO: 39895 - DNA, 20 bp, Vibrio cholerae
agtggcaagcgtcctcccgg

SEQ ID NO: 39896 - DNA, 20 bp, Anaerococcus prevotii
gcgtagatattaaaaagaat

SEQ ID NO: 39897 - DNA, 20 bp, Campylobacter sputorum
agaagtttccccttcggggg

SEQ ID NO: 39898 - DNA, 20 bp, Corynebacterium glucuronolyticum
attgcttgagtgctgtaggg

SEQ ID NO: 39899 - DNA, 20 bp, Brevibacillus choshinensis
gctctcttcggagcagcggt

SEQ ID NO: 39900 - DNA, 20 bp, Actinomyces naeslundii
ggtctgtcgcatggtgggcc

SEQ ID NO: 39901 - DNA, 20 bp, Streptococcus acidominimus
gtaaacatttaaaaggtgca

SEQ ID NO: 39902 - DNA, 20 bp, Corynebacterium coyleae
tacaccagatcgccgtagag

SEQ ID NO: 39903 - DNA, 20 bp, Streptococcus infantarius
tgaaaactttagcttgctaa

SEQ ID NO: 39904 - DNA, 20 bp, Eggerthella lenta
atgaaaccgccctcgggcgg

SEQ ID NO: 39905 - DNA, 20 bp, Streptococcus suis
acttgaaaggagcaattgct

SEQ ID NO: 39906 - DNA, 20 bp, Corynebacterium macginleyi
ggataggaccgcactttagt

SEQ ID NO: 39907 - DNA, 20 bp, Leuconostoc argentinum
tgatacaaagttgaaaggcg

SEQ ID NO: 39908 - DNA, 20 bp, Streptococcus mutans
agcccgtatcggaaggtgcg

SEQ ID NO: 39909 - DNA, 20 bp, Streptococcus canis
gtgcttgcactagtctaagg

SEQ ID NO: 39910 - DNA, 20 bp, Streptococcus dysgalactiae
actgcatcactatgagatgg

SEQ ID NO: 39911 - DNA, 20 bp, Myroides odoratus
tttaaagggttcgtaggcgg

SEQ ID NO: 39912 - DNA, 20 bp, Leuconostoc lactis
caccgcatggtgtagggttg

SEQ ID NO: 39913 - DNA, 20 bp, Pseudoramibacter alactolyticus
cgagaaggttttgaatgatc

SEQ ID NO: 39914 - DNA, 20 bp, Rothia mucilaginosa
acgaccaatctccgcatggg

SEQ ID NO: 39915 - DNA, 20 bp, Propionibacterium freudenreichii
gtccaatgttgccagcagtt

SEQ ID NO: 39916 - DNA, 20 bp, Prevotella loescheii
cggtgaccaagcgaaagcgt

SEQ ID NO: 39917 - DNA, 20 bp, Pediococcus pentosaceus
cgttaattgattatgacgta

SEQ ID NO: 39918 - DNA, 20 bp, Prevotella intermedia
gggtgagtatcgcgtatcca

SEQ ID NO: 39919 - DNA, 20 bp, Delftia acidovorans
taatacgagaggcccatgac

SEQ ID NO: 39920 - DNA, 20 bp, Campylobacter curvus
aatcatctagagatagaaga

SEQ ID NO: 39921 - DNA, 20 bp, Virgibacillus pantothenticus
cgggggtgacgcttgtggaa

SEQ ID NO: 39922 - DNA, 20 bp, Clostridium glycolicum
ttcacttcggtgaagagcgg

SEQ ID NO: 39923 - DNA, 20 bp, Campylobacter lari
gtgctagtcacggcagtaat

SEQ ID NO: 39924 - DNA, 20 bp, Enterobacter sakazakii
ggtcagcttgagtctcgtag

SEQ ID NO: 39925 - DNA, 20 bp, Eggerthella lenta
gaggctcgagttcggtagag

SEQ ID NO: 39926 - DNA, 20 bp, Leptotrichia buccalis
tctttaaagccggtccaagt

SEQ ID NO: 39927 - DNA, 20 bp, Lactococcus lactis
ataccgcataacaactttaa

SEQ ID NO: 39928 - DNA, 20 bp, Tetragenococcus halophilus
aaagaggaaatgctttttct

SEQ ID NO: 39929 - DNA, 20 bp, Anaerococcus prevotii
ctccggcggtctaagatgga

SEQ ID NO: 39930 - DNA, 20 bp, Bacillus sp
atgaagagcttgcttttgat

SEQ ID NO: 39931 - DNA, 20 bp, Moraxella bovis
gtcgaacgatgactatctag

SEQ ID NO: 39932 - DNA, 20 bp, Bacteroides fragilis
aatcaccgctgtgaaggtgc

SEQ ID NO: 39933 - DNA, 20 bp, Virgibacillus pantothenticus
cgaataggttggcaccttga

SEQ ID NO: 39934 - DNA, 20 bp, Sporosarcina pasteurii
tctctataccggtcagcggg

SEQ ID NO: 39935 - DNA, 20 bp, Anaerococcus prevotii
aatacccgaagcctgcgagc

SEQ ID NO: 39936 - DNA, 20 bp, Clostridium tetani
acaggagagggaaacggaat

SEQ ID NO: 39937 - DNA, 20 bp, Bacillus lentus
ccaacaaaaagcaagcttct

SEQ ID NO: 39938 - DNA, 20 bp, Cardiobacterium hominis
atctgccttttgctggggga

SEQ ID NO: 39939 - DNA, 20 bp, Corynebacterium xerosis
aggaccgcaccgtgagggtg

SEQ ID NO: 39940 - DNA, 20 bp, Gemella haemolysans
aataccggataacagcatta

SEQ ID NO: 39941 - DNA, 20 bp, Peptostreptococcus anaerobius
aatacatgataatatatatt

SEQ ID NO: 39942 - DNA, 20 bp, Clostridium innocuum
ggagtcagtaatacccgaag

SEQ ID NO: 39943 - DNA, 20 bp, Actinomyces bovis
aaattcagtgctgtagttaa

SEQ ID NO: 39944 - DNA, 20 bp, Enterococcus cecorum
tgcccatcagcgggggataa

SEQ ID NO: 39945 - DNA, 20 bp, Clostridium tertium
aagtcgagcgagaggagttc

SEQ ID NO: 39946 - DNA, 20 bp, Streptococcus acidominimus
taaacatttaaaaggtgcaa

SEQ ID NO: 39947 - DNA, 20 bp, Lactobacillus acidophilus
gaccacctaagagattaggt

SEQ ID NO: 39948 - DNA, 20 bp, Facklamia ignava
gtacagcgagaagcgacgtc

SEQ ID NO: 39949 - DNA, 20 bp, Prevotella oris
acgaacgattcagagatgat

SEQ ID NO: 39950 - DNA, 20 bp, Helcococcus kunzii
gattgtaaagttctgtcctt

SEQ ID NO: 39951 - DNA, 20 bp, Alcaligenes faecalis
agcgcgagagagcttgctct

SEQ ID NO: 39952 - DNA, 20 bp, Myroides odoratimimus
tgttcggttttcggactgag

SEQ ID NO: 39953 - DNA, 20 bp, Lactococcus lactis
accgcataacaactttaaac

SEQ ID NO: 39954 - DNA, 20 bp, Microbacterium hominis
cgtagaaatacgggactctt

SEQ ID NO: 39955 - DNA, 20 bp, Haemophilus actinemycetemcomitans
agggcacgtaggcggacctt

SEQ ID NO: 39956 - DNA, 20 bp, Haemophilus actinemycetemcomitans
gaagaagaactcagagatgg

SEQ ID NO: 39957 - DNA, 20 bp, Leptotrichia buccalis
atcttgacatcctacgaatg

SEQ ID NO: 39958 - DNA, 20 bp, Corynebacterium mycetoides
gtgaggtggggctaatcgct

SEQ ID NO: 39959 - DNA, 20 bp, Streptococcus dysgalactiae
aatgatggtgggagtggaaa

SEQ ID NO: 39960 - DNA, 20 bp, Bordetella bronchiseptica
agaaacggcacgggctaata

SEQ ID NO: 39961 - DNA, 20 bp, Atopobium parvulum
gtcgtggccgaaaggagcct

SEQ ID NO: 39962 - DNA, 20 bp, Acinetobacter calcoaceticus
cgagcggagtgatggtgctt

SEQ ID NO: 39963 - DNA, 20 bp, Alicyclobacillus acidocaldarius
ccttcggcactggggtgtgt

SEQ ID NO: 39964 - DNA, 20 bp, Haemophilus paraphrophilus
caacaaattgacgttaatca

SEQ ID NO: 39965 - DNA, 20 bp, Eggerthella lenta
agcccagacggcaagggatg

SEQ ID NO: 39966 - DNA, 20 bp, Streptococcus hyovaginalis
aagtttactctgtgacggta

SEQ ID NO: 39967 - DNA, 20 bp, Moraxella osloensis
aggtggctcattaagtcaca

SEQ ID NO: 39968 - DNA, 20 bp, Leptotrichia buccalis
agatatgtgcaggaatgccg

SEQ ID NO: 39969 - DNA, 20 bp, Bacteroides merdae
atgctaatctccaaaccatg

SEQ ID NO: 39970 - DNA, 20 bp, Streptococcus parasanguinis
gcaccgagcggaggagttgc

SEQ ID NO: 39971 - DNA, 20 bp, Bacillus lentus
ggaaagataatctatccggt

SEQ ID NO: 39972 - DNA, 20 bp, Clostridium butyricum
caaaactataaaaccgatct

SEQ ID NO: 39973 - DNA, 20 bp, Prevotella bivia
tacccataactaagggataa

SEQ ID NO: 39974 - DNA, 20 bp, Anaerococcus prevotii
aagagtagaggtaagtggaa

SEQ ID NO: 39975 - DNA, 20 bp, Corynebacterium glucuronolyticum
catatgtgagattgggctag

SEQ ID NO: 39976 - DNA, 20 bp, Bacillus fusiformis
ttcacctcatggtgaaacac

SEQ ID NO: 39977 - DNA, 20 bp, Clostridium septicum
actccttccgtgccgccgtt

SEQ ID NO: 39978 - DNA, 20 bp, Veillonella parvula
agtcagtctgtcttaaaagt

SEQ ID NO: 39979 - DNA, 20 bp, Comamonas testosteroni
atggcaggaacttaccagag

SEQ ID NO: 39980 - DNA, 20 bp, Streptococcus sanguinis
taattgaaaggtgcaattgc

SEQ ID NO: 39981 - DNA, 20 bp, Moraxella osloensis
ggggcgcaagctcttgctat

SEQ ID NO: 39982 - DNA, 20 bp, Bacillus alcalophilus
aaccccgaggggtcattgga

SEQ ID NO: 39983 - DNA, 20 bp, Alicyclobacillus acidocaldarius
attccggcctgaaaggcaga

SEQ ID NO: 39984 - DNA, 20 bp, Peptoniphilus indolicus
tcacaaactgacgctgagga

SEQ ID NO: 39985 - DNA, 20 bp, Alicyclobacillus acidocaldarius
ctctgagggtgtcagaggga

SEQ ID NO: 39986 - DNA, 20 bp, Fusobacterium nucleatum
ttagaattatgaaagctata

SEQ ID NO: 39987 - DNA, 20 bp, Burkholderia gladioli
attgacgctggcggcatgcc

SEQ ID NO: 39988 - DNA, 20 bp, Neisseria lactamica
tcggctgatgacggtacccg

SEQ ID NO: 39989 - DNA, 20 bp, Weeksella virosa
agtcgatgatctttaggggt

SEQ ID NO: 39990 - DNA, 20 bp, Streptococcus constellatus
atggctcaggacgacgctgg

SEQ ID NO: 39991 - DNA, 20 bp, Acinetobacter calcoaceticus
ggaggaggctactgaagtta

SEQ ID NO: 39992 - DNA, 20 bp, Anaerococcus tetradius
agtaagcttttaaaactgct

SEQ ID NO: 39993 - DNA, 20 bp, Gemella bergeri
atggatagggacaaagagaa

SEQ ID NO: 39994 - DNA, 20 bp, Micrococcus luteus
ccggataggagcgcccaccg

SEQ ID NO: 39995 - DNA, 20 bp, Pasteurella trehalosi
tgttttgtttaatagacaaa

SEQ ID NO: 39996 - DNA, 20 bp, Campylobacter sputorum
ggaacaacacttagaaatga

SEQ ID NO: 39997 - DNA, 20 bp, Streptococcus pyogenes
gggtgcttgcaccggttcaa

SEQ ID NO: 39998 - DNA, 20 bp, Streptococcus hyovaginalis
tgatttaaaaggagcaattg

SEQ ID NO: 39999 - DNA, 20 bp, Corynebacterium renale
tttgacatacaccagaccgg

SEQ ID NO: 40000 - DNA, 20 bp, Prevotella melaninogenica
cagctgacgggagcgcaact

SEQ ID NO: 40001 - DNA, 20 bp, Methylobacterium extorquens
tcggggatcctcttcggagg

SEQ ID NO: 40002 - DNA, 20 bp, Fusobacterium varium
taacagagatgttttcgtgc

SEQ ID NO: 40003 - DNA, 20 bp, Alicyclobacillus acidocaldarius
tcactccagacttgctcgac

SEQ ID NO: 40004 - DNA, 20 bp, Collinsella aerofaciens
gggggacgatccccccgtgc

SEQ ID NO: 40005 - DNA, 20 bp, Veillonella atypica
gtcagtctgtcttaaaagtt

SEQ ID NO: 40006 - DNA, 20 bp, Bacillus alcalophilus
tccggctatcactacgggat

SEQ ID NO: 40007 - DNA, 20 bp, Prevotella loescheii
tcgatgatacgcgaggaacc

SEQ ID NO: 40008 - DNA, 20 bp, Bacteroides fragilis
cataatgattccgcatggtt

SEQ ID NO: 40009 - DNA, 20 bp, Eremococcus coleocola
tctcttaaagtcgttctcag

SEQ ID NO: 40010 - DNA, 20 bp, Prevotella disiens
atgctcaacatctgacttgc

SEQ ID NO: 40011 - DNA, 20 bp, Bacillus lentus
catctgtaagtgatggcaat

SEQ ID NO: 40012 - DNA, 20 bp, Bacteroides uniformis
gtacagtagaggcaggcgga

SEQ ID NO: 40013 - DNA, 20 bp, Propionibacterium freudenreichii
atcccgaatatgagcctggc

SEQ ID NO: 40014 - DNA, 20 bp, Streptococcus constellatus
tataagaacatttactgcat

SEQ ID NO: 40015 - DNA, 20 bp, Weissella paramesenteroides
aacggcactgagagtaactg

SEQ ID NO: 40016 - DNA, 20 bp, Citrobacter farmeri
ccttagccattgacgttacc

SEQ ID NO: 40017 - DNA, 20 bp, Corynebacterium auris
cgaagccagtggcctgtcat

SEQ ID NO: 40018 - DNA, 20 bp, Leptotrichia buccalis
ccagatcttgacatcctacg

SEQ ID NO: 40019 - DNA, 20 bp, Cellulosimicrobium cellulans
acttcgggataactccggga

SEQ ID NO: 40020 - DNA, 20 bp, Dermacoccus nishinomiyaensis
gacatacaccggaatcatgc

SEQ ID NO: 40021 - DNA, 20 bp, Streptococcus thermophilus
gcggatgagttgcgaacggg

SEQ ID NO: 40022 - DNA, 20 bp, Bacillus coagulans
atggaggaaaaaggaaaggc

SEQ ID NO: 40023 - DNA, 20 bp, Propionibacterium acnes
acatggatcgggagtgctca

SEQ ID NO: 40024 - DNA, 20 bp, Bacillus sp
gaactccctatctctagggc

SEQ ID NO: 40025 - DNA, 20 bp, Dermabacter hominis
gatgtggttttctttggact

SEQ ID NO: 40026 - DNA, 20 bp, Corynebacterium glucuronolyticum
tgtgtcgcgtcgtctgtgta

SEQ ID NO: 40027 - DNA, 20 bp, Brevibacillus choshinensis
agacctttggtcacgtacag

SEQ ID NO: 40028 - DNA, 20 bp, Bacteroides uniformis
ctattaaagaatttcggtca

SEQ ID NO: 40029 - DNA, 20 bp, Anaerococcus prevotii
ctacaatggaagatacaaag

SEQ ID NO: 40030 - DNA, 20 bp, Peptostreptococcus anaerobius
cgaagccgattatccaaccg

SEQ ID NO: 40031 - DNA, 20 bp, Haemophilus influenzae
cacatcaaattgacgttaaa

SEQ ID NO: 40032 - DNA, 20 bp, Clostridium difficile
tctttcaagtcaggagtgaa

SEQ ID NO: 40033 - DNA, 20 bp, Propionibacterium granulosum
tcagcagggacgaagctttt

SEQ ID NO: 40034 - DNA, 20 bp, Lactococcus lactis
agctcatcaagtgacggtaa

SEQ ID NO: 40035 - DNA, 20 bp, Bacteroides uniformis
ttgcagttgatactgggtgt

SEQ ID NO: 40036 - DNA, 20 bp, Leuconostoc argentinum
acaaagttgaaaggcgctac

SEQ ID NO: 40037 - DNA, 20 bp, Bacteroides forsythus
gactgtcagttgctaacagg

SEQ ID NO: 40038 - DNA, 20 bp, Methylobacterium extorquens
cctcgagagatcggggatcc

SEQ ID NO: 40039 - DNA, 20 bp, Bacillus pallidus
ggtgactgccggctaaaagt

SEQ ID NO: 40040 - DNA, 20 bp, Bacillus pallidus
cggttgaaaggcggctttta

SEQ ID NO: 40041 - DNA, 20 bp, Prevotella intermedia
tcgcgtatccaaccttccct

SEQ ID NO: 40042 - DNA, 20 bp, Aneurinibacillus aneurinilyticus
ggtctgaaagagaaagacct

SEQ ID NO: 40043 - DNA, 20 bp, Bordetella bronchiseptica
gcacgggctaatatcctgtg

SEQ ID NO: 40044 - DNA, 20 bp, Streptococcus infantarius
tcccgatgccattcctagag

SEQ ID NO: 40045 - DNA, 20 bp, Veillonella dispar
agacggaagcaataccgcga

SEQ ID NO: 40046 - DNA, 20 bp, Clostridium clostridiiforme
tggtgcgaaaaactccggtg

SEQ ID NO: 40047 - DNA, 20 bp, Bacteroides distasonis
gcgtatgcaacttgcctatc

SEQ ID NO: 40048 - DNA, 20 bp, Streptococcus thermophilus
ataacaatggatgacacatg

SEQ ID NO: 40049 - DNA, 20 bp, Kocuria rosea
agtcgagcgaactgacgaga

SEQ ID NO: 40050 - DNA, 20 bp, Oligella urethralis
ccctctttcctccgtagaga

SEQ ID NO: 40051 - DNA, 20 bp, Bacteroides capilosus
gacatccgactaacgaagca

SEQ ID NO: 40052 - DNA, 20 bp, Bacteroides ureolyticus
agtctagagtaggggagagg

SEQ ID NO: 40053 - DNA, 20 bp, Gemella morbillorum
cactagaaaaacttagcggc

SEQ ID NO: 40054 - DNA, 20 bp, Shewanella putrefaciens
gggagtttacttctgaggtg

SEQ ID NO: 40055 - DNA, 20 bp, Bacteroides stercoris
tccatcaggttatgctgggg

SEQ ID NO: 40056 - DNA, 20 bp, Clostridium sordellii
ggaactgtaggacttgagtg

SEQ ID NO: 40057 - DNA, 20 bp, Kingella denitrificans
taataccactttttgttgac

SEQ ID NO: 40058 - DNA, 20 bp, Enterococcus raffinosus
tggtttctatttgaaaggcg

SEQ ID NO: 40059 - DNA, 20 bp, Streptococcus parasanguinis
taccgcataaaagtcgacat

SEQ ID NO: 40060 - DNA, 20 bp, Corynebacterium confusum
cgcggcagagatgtcgtttc

SEQ ID NO: 40061 - DNA, 20 bp, Prevotella intermedia
gcctttcactttctggcttg

SEQ ID NO: 40062 - DNA, 20 bp, Tissierella praeacuta
taattatcttagcggcggac

SEQ ID NO: 40063 - DNA, 20 bp, Anaerococcus prevotii
tttcgagtcgtaaagttctt

SEQ ID NO: 40064 - DNA, 20 bp, Gemella haemolysans
agttggttttgctaacacta

SEQ ID NO: 40065 - DNA, 20 bp, Streptococcus acidominimus
tttaaaaggtgcaactgcac

SEQ ID NO: 40066 - DNA, 20 bp, Peptoniphilus indolicus
aattagcggtcaaagatgga

SEQ ID NO: 40067 - DNA, 20 bp, Comamonas testosteroni
gctactagagcggctgatgg

SEQ ID NO: 40068 - DNA, 20 bp, Streptococcus equi
cgtaggtaacctagcttata

SEQ ID NO: 40069 - DNA, 20 bp, Staphylococcus succinus
gaacggctaccttgtacgac

SEQ ID NO: 40070 - DNA, 20 bp, Lactococcus raffinolactis
atacccaaagccggtgagct

SEQ ID NO: 40071 - DNA, 20 bp, Leuconostoc lactis
cataaaacctaacaccgcat

SEQ ID NO: 40072 - DNA, 20 bp, Prevotella loescheii
gtgaaaccggtgattggggc

SEQ ID NO: 40073 - DNA, 20 bp, Prevotella melaninogenica
tgaagtaaagatttatcggt

SEQ ID NO: 40074 - DNA, 20 bp, Lactococcus lactis
aaaaactttaaacacaagtt

SEQ ID NO: 40075 - DNA, 20 bp, Tetragenococcus halophilus
ttttttcacctgaaagaaag

SEQ ID NO: 40076 - DNA, 20 bp, Porphyromonas endodontalis
tttattgattacagatgggc

SEQ ID NO: 40077 - DNA, 20 bp, Bacteroides fragilis
ggcatcaggaagaaagcttg

SEQ ID NO: 40078 - DNA, 20 bp, Campylobacter rectus
taacaaatcatccagagatg

SEQ ID NO: 40079 - DNA, 20 bp, Haemophilus haemolyticus
gtagtgtcgagagacgaaag

SEQ ID NO: 40080 - DNA, 20 bp, Pasteurella multocida
gctatatgcttggtgcccga

SEQ ID NO: 40081 - DNA, 20 bp, Bacteroides merdae
agtttgtggctcaaccataa

SEQ ID NO: 40082 - DNA, 20 bp, Paenibacillus azotofixans
cactggaaactggacagctt

SEQ ID NO: 40083 - DNA, 20 bp, Propionibacterium granulosum
tccactgttgccagcaattc

SEQ ID NO: 40084 - DNA, 20 bp, Comamonas terrigena
gaccttgtgctactagagcg

SEQ ID NO: 40085 - DNA, 20 bp, Porphyromonas endodontalis
gtagtcttgccgttgaaact

SEQ ID NO: 40086 - DNA, 20 bp, Alicyclobacillus acidocaldarius
cgtatccggcattagcgccc

SEQ ID NO: 40087 - DNA, 20 bp, Campylobacter curvus
atctagagatagaagagtgt

SEQ ID NO: 40088 - DNA, 20 bp, Stenotrophomonas maltophilia
ggatactgggcgactagaat

SEQ ID NO: 40089 - DNA, 20 bp, Staphylococcus condimenti
aatgccggataatatgcgga

SEQ ID NO: 40090 - DNA, 20 bp, Neisseria lactamica
tgtcggggaagaaaaggtcg

SEQ ID NO: 40091 - DNA, 20 bp, Comamonas testosteroni
tggcaggaacttaccagaga

SEQ ID NO: 40092 - DNA, 20 bp, Prevotella melaninogenica
atcaaatcttgaaagccggt

SEQ ID NO: 40093 - DNA, 20 bp, Stenotrophomonas maltophilia
aactgcagtggaaactggac

SEQ ID NO: 40094 - DNA, 20 bp, Acinetobacter junii
ctaatactcttggatagtgg

SEQ ID NO: 40095 - DNA, 20 bp, Fusobacterium nucleatum
attatgattttagggcatcc

SEQ ID NO: 40096 - DNA, 20 bp, Corynebacterium glucuronolyticum
taatcgcgaaagccagtctc

SEQ ID NO: 40097 - DNA, 20 bp, Peptostreptococcus anaerobius
atccaaccgcaaggaggaag

SEQ ID NO: 40098 - DNA, 20 bp, Clostridium glycolicum
cagccaagtcgtgaggccga

SEQ ID NO: 40099 - DNA, 20 bp, Staphylococcus aureus
cgagcgaacggacgagaagc

SEQ ID NO: 40100 - DNA, 20 bp, Kingella denitrificans
agtagtgggggataaccaat

SEQ ID NO: 40101 - DNA, 20 bp, Brevibacillus choshinensis
gcgagagtgcgcgaatccct

SEQ ID NO: 40102 - DNA, 20 bp, Actinomyces bovis
tgatgccatagaaactggta

SEQ ID NO: 40103 - DNA, 20 bp, Pediococcus inopinatus
catcttctgctaacctaaga

SEQ ID NO: 40104 - DNA, 20 bp, Plesiomonas shigelloides
accaaagtgggggctcttcg

SEQ ID NO: 40105 - DNA, 20 bp, Paenibacillus thiaminolyticus
aagtcgagcggagcgacggt

SEQ ID NO: 40106 - DNA, 20 bp, Bacteroides capilosus
  misc_feature (3)..(3): n is a, c, g, or t
ctngatgaataagccacggc

SEQ ID NO: 40107 - DNA, 20 bp, Capnocytophaga gingivalis
agagatacgcccttcttcgg

SEQ ID NO: 40108 - DNA, 20 bp, Helcococcus ovis
gttctgtccttagtgaagat

SEQ ID NO: 40109 - DNA, 20 bp, Moraxella osloensis
agcctaacgaaagagggcgc

SEQ ID NO: 40110 - DNA, 20 bp, Anaerococcus prevotii
gagatataccctcttcttcg

SEQ ID NO: 40111 - DNA, 20 bp, Prevotella loescheii
acatgtggtttaattcgatg

SEQ ID NO: 40112 - DNA, 20 bp, Streptococcus sp.
aattaattgaaagatgcaat

SEQ ID NO: 40113 - DNA, 20 bp, Lactococcus garvieae
aaccattgtgtgcattggaa

SEQ ID NO: 40114 - DNA, 20 bp, Corynebacterium propinquum
atcgcttaaagctggtctta

SEQ ID NO: 40115 - DNA, 20 bp, Dietzia maris
aaacaactgacgctgaggaa

SEQ ID NO: 40116 - DNA, 20 bp, Weissella paramesenteroides
tccgcccttgagtgtcgcag

SEQ ID NO: 40117 - DNA, 20 bp, Vibrio mimicus
aaggtggttaagttaatacc

SEQ ID NO: 40118 - DNA, 20 bp, Prevotella intermedia
ctacagttccaaaagcttac

SEQ ID NO: 40119 - DNA, 20 bp, Leuconostoc argentinum
acttgagtgttgtagaggta

SEQ ID NO: 40120 - DNA, 20 bp, Eggerthella lenta
aaggcagcctgctgggccgc

SEQ ID NO: 40121 - DNA, 20 bp, Streptococcus ratti
atgctattcttagagatagg

SEQ ID NO: 40122 - DNA, 20 bp, Arcanobacterium bernardiae
tgccagagatggtgcagcct

SEQ ID NO: 40123 - DNA, 20 bp, Fusobacterium mortiferum
gatattatgtgagtttcgca

SEQ ID NO: 40124 - DNA, 20 bp, Gemella bergeri
agtgttggtctcaaaagaga

SEQ ID NO: 40125 - DNA, 20 bp, Brevibacillus borstelensis
gagcgagtcccttcgggggc

SEQ ID NO: 40126 - DNA, 20 bp, Alicyclobacillus acidocaldarius
tcctctgccccgaagggacc

SEQ ID NO: 40127 - DNA, 20 bp, Streptococcus canis
gagtggaaaacccattatgt

SEQ ID NO: 40128 - DNA, 20 bp, Proteus vulgaris
gtcttgaactgtggcttctg

SEQ ID NO: 40129 - DNA, 20 bp, Moraxella osloensis
aagtcgaacgatgactctct

SEQ ID NO: 40130 - DNA, 20 bp, Granulicatella adiacens
aagtcgaacgagagcgaccg

SEQ ID NO: 40131 - DNA, 20 bp, Eikenella corrodens
agtgctaataccactttttg

SEQ ID NO: 40132 - DNA, 20 bp, Acinetobacter johnsonii
gaggaggaggctacttggat

SEQ ID NO: 40133 - DNA, 20 bp, Fusobacterium nucleatum
gatactgcctacgatgagta

SEQ ID NO: 40134 - DNA, 20 bp, Streptococcus ratti
gtcgaacaaggtagccgtat

SEQ ID NO: 40135 - DNA, 20 bp, Streptococcus uberis
tttaaaaggggcaaatgctt

SEQ ID NO: 40136 - DNA, 20 bp, Bacteroides stercoris
ccaccaaaccgacgatggat

SEQ ID NO: 40137 - DNA, 20 bp, Rothia mucilaginosa
gatacgaccaatctccgcat

SEQ ID NO: 40138 - DNA, 20 bp, Porphyromonas endodontalis
ttttgtagaggaataatggc

SEQ ID NO: 40139 - DNA, 20 bp, Streptococcus suis
actagacggatgagttgcga

SEQ ID NO: 40140 - DNA, 20 bp, Bacillus coagulans
ttggaggctgttcccctgag

SEQ ID NO: 40141 - DNA, 20 bp, Streptococcus thermophilus
caatggatgacacatgtcat

SEQ ID NO: 40142 - DNA, 20 bp, Prevotella intermedia
cactttctggcttgaaagac

SEQ ID NO: 40143 - DNA, 20 bp, Clostridium septicum
gtcgagcgaggggagtttct

SEQ ID NO: 40144 - DNA, 20 bp, Bacillus coagulans
tggaggaaaaaggaaaggcg

SEQ ID NO: 40145 - DNA, 20 bp, Anaerococcus prevotii
ttcggggtgaagataagatg

SEQ ID NO: 40146 - DNA, 20 bp, Prevotella denticola
tggagattaagtgtgttgtg

SEQ ID NO: 40147 - DNA, 20 bp, Actinomyces turicensis
cttctttgggataacggtcg

SEQ ID NO: 40148 - DNA, 20 bp, Peptoniphilus indolicus
aacctgcctttgacacgggg

SEQ ID NO: 40149 - DNA, 20 bp, Bacteroides stercoris
caaaccgacgatggataggg

SEQ ID NO: 40150 - DNA, 20 bp, Moraxella atlantae
taacatttaggaaactgcct

SEQ ID NO: 40151 - DNA, 20 bp, Eggerthella lenta
gctcgagttcggtagaggca

SEQ ID NO: 40152 - DNA, 20 bp, Weeksella virosa
tatcgcttaacgatagaact

SEQ ID NO: 40153 - DNA, 20 bp, Gemella morbillorum
ctcgcgagagtcagccaacc

SEQ ID NO: 40154 - DNA, 20 bp, Lactococcus lactis
gtaccgactggatgagcagc

SEQ ID NO: 40155 - DNA, 20 bp, Bacillus sp
cgcaagctgtcacttacaga

SEQ ID NO: 40156 - DNA, 20 bp, Comamonas testosteroni
aaaagcctggggctaatatc

SEQ ID NO: 40157 - DNA, 20 bp, Moraxella osloensis
tacccattagattagacgtt

SEQ ID NO: 40158 - DNA, 20 bp, Brevibacterium epidermidis
cgttctggaaacagttcttc

SEQ ID NO: 40159 - DNA, 20 bp, Prevotella loescheii
cttgcaatccccgatggcga

SEQ ID NO: 40160 - DNA, 20 bp, Corynebacterium mycetoides
ggggctaatcgctgaaagcc

SEQ ID NO: 40161 - DNA, 20 bp, Bacteroides vulgatus
ggggggtacagagggccgct

SEQ ID NO: 40162 - DNA, 20 bp, Proteus mirabilis
ttgcactatcggatgaaccc

SEQ ID NO: 40163 - DNA, 20 bp, Alicyclobacillus acidocaldarius
ttccggcctgaaaggcagat

SEQ ID NO: 40164 - DNA, 20 bp, Serratia marcescens
gttcatcaattgacgttact

SEQ ID NO: 40165 - DNA, 20 bp, Corynebacterium group F
taggacaactttttggatat

SEQ ID NO: 40166 - DNA, 20 bp, Acinetobacter calcoaceticus
ctgaagttaataccttcaga

SEQ ID NO: 40167 - DNA, 20 bp, Bacteroides uniformis
gaacttagcttgctaagttt

SEQ ID NO: 40168 - DNA, 20 bp, Arcanobacterium bernardiae
ggatattctgctttcatcgc

SEQ ID NO: 40169 - DNA, 20 bp, Brevibacillus choshinensis
ccaatcctcagtgccgcagc

SEQ ID NO: 40170 - DNA, 20 bp, Corynebacterium falsenii
tgtggggatctttctacgat

SEQ ID NO: 40171 - DNA, 20 bp, Porphyromonas endodontalis
tcttttgtagaggaataatg

SEQ ID NO: 40172 - DNA, 20 bp, Lactococcus garvieae
ctcaaccattgtgtgcattg

SEQ ID NO: 40173 - DNA, 20 bp, Fusobacterium nucleatum
aatacctgatattatgattt

SEQ ID NO: 40174 - DNA, 20 bp, Bacillus laevolacticus
gtttgatcatggctcagggc

SEQ ID NO: 40175 - DNA, 20 bp, Facklamia languida
aggatggctccgcggtgcat

SEQ ID NO: 40176 - DNA, 20 bp, Leptotrichia buccalis
tggagaggtggacggaactg

SEQ ID NO: 40177 - DNA, 20 bp, Escherichia hermannii
acggttaataaccgcgtcga

SEQ ID NO: 40178 - DNA, 20 bp, Finegoldia magna
aatgagagtggcgaacgggt

SEQ ID NO: 40179 - DNA, 20 bp, Brevibacterium epidermidis
atacactggaccgttctgga

SEQ ID NO: 40180 - DNA, 20 bp, Brevibacterium linens
gagagatgcgagaccgcgag

SEQ ID NO: 40181 - DNA, 20 bp, Moraxella lacunata
tacgagagaaagggggcttt

SEQ ID NO: 40182 - DNA, 20 bp, Bacteroides thetaiotaomicron
gcagttgatactggctgtct

SEQ ID NO: 40183 - DNA, 20 bp, Leptotrichia buccalis
atgaagatagttcactggac

SEQ ID NO: 40184 - DNA, 20 bp, Corynebacterium group F
taccggataggacaactttt

SEQ ID NO: 40185 - DNA, 20 bp, Bacillus sp
tttgcttggcctcacggctt

SEQ ID NO: 40186 - DNA, 20 bp, Porphyromonas gingivalis
aaagggtgcgtaggttgttc

SEQ ID NO: 40187 - DNA, 20 bp, Clostridium tetani
ggcggtttcctggactgtaa

SEQ ID NO: 40188 - DNA, 20 bp, Bacteroides forsythus
ttgtcgcttaacgataaaat

SEQ ID NO: 40189 - DNA, 20 bp, Brevibacterium epidermidis
cttctctttggagctggtgt

SEQ ID NO: 40190 - DNA, 20 bp, Haemophilus paraphrophilus
gtgacgaggaaggttgttgt

SEQ ID NO: 40191 - DNA, 20 bp, Cardiobacterium hominis
ggaatctgccttttgctggg

SEQ ID NO: 40192 - DNA, 20 bp, Actinomyces neuii
tctcttaaagggcatcttgg

SEQ ID NO: 40193 - DNA, 20 bp, Veillonella atypica
tgatggacagaaccagagat

SEQ ID NO: 40194 - DNA, 20 bp, Actinomyces radingae
caagtcgaacgggatctgcg

SEQ ID NO: 40195 - DNA, 20 bp, Leptotrichia buccalis
tactgggtgtgggcatgaag

SEQ ID NO: 40196 - DNA, 20 bp, Campylobacter concisus
cgacatgtcaccgcatggtg

SEQ ID NO: 40197 - DNA, 20 bp, Bacillus sp
tccctatctctagggccgtc

SEQ ID NO: 40198 - DNA, 20 bp, Staphylococcus carnosus
tgcgtaggtaactatgcgca

SEQ ID NO: 40199 - DNA, 20 bp, Anaerococcus tetradius
ttagagatagttccttactt

SEQ ID NO: 40200 - DNA, 20 bp, Bacteroides fragilis
ataagaataaagtgcagtat

SEQ ID NO: 40201 - DNA, 20 bp, Streptococcus parauberis
ctaataccgcatgacaatta

SEQ ID NO: 40202 - DNA, 20 bp, Corynebacterium glucuronolyticum
tggcaggcgatacgggcatt

SEQ ID NO: 40203 - DNA, 20 bp, Acinetobacter calcoaceticus
gtcgagcggagtgatggtgc

SEQ ID NO: 40204 - DNA, 20 bp, Corynebacterium coyleae
tgagggtgtgctaatcgctg

SEQ ID NO: 40205 - DNA, 20 bp, Corynebacterium auris
gcgctaggtgtgagcctctt

SEQ ID NO: 40206 - DNA, 20 bp, Clostridium butyricum
tggaggaagccacttcggtg

SEQ ID NO: 40207 - DNA, 20 bp, Bacillus flexus
tctatgacgttagcggcgga

SEQ ID NO: 40208 - DNA, 20 bp, Gemella bergeri
tataagatggctttgcggag

SEQ ID NO: 40209 - DNA, 20 bp, Bacteroides capilosus
gcgcggccgaaggtgggttc

SEQ ID NO: 40210 - DNA, 20 bp, Helcococcus kunzii
cgaatcgcataaaacagatc

SEQ ID NO: 40211 - DNA, 20 bp, Actinomyces odontolyticus
taatactggatattcactga

SEQ ID NO: 40212 - DNA, 20 bp, Alcaligenes faecalis
agatttggccgtgctcgcaa

SEQ ID NO: 40213 - DNA, 20 bp, Arcanobacterium bernardiae
gccagagatggtgcagcctt

SEQ ID NO: 40214 - DNA, 20 bp, Staphylococcus carnosus
ggttctgcaatgaaagacgg

SEQ ID NO: 40215 - DNA, 20 bp, Stenotrophomonas maltophilia
gggaaagaaatccagctggt

SEQ ID NO: 40216 - DNA, 20 bp, Streptococcus anginosus
aataccgcataacagtatgt

SEQ ID NO: 40217 - DNA, 20 bp, Streptococcus suis
tagatacttgaaaggagcaa

SEQ ID NO: 40218 - DNA, 20 bp, Suttonella indologenes
gctaaagaagaagcaccggc

SEQ ID NO: 40219 - DNA, 20 bp, Actinomyces bovis
tcaagtttatggttaaagtt

SEQ ID NO: 40220 - DNA, 20 bp, Clostridium glycolicum
caagtcgagcgattcacttc

SEQ ID NO: 40221 - DNA, 20 bp, Staphylococcus capitis
taccggataggacagctgtt

SEQ ID NO: 40222 - DNA, 20 bp, Yersinia ruckeri
ctgaacattgacgttactcg

SEQ ID NO: 40223 - DNA, 20 bp, Pseudoramibacter alactolyticus
ggttttgtcgcatggcaaga

SEQ ID NO: 40224 - DNA, 20 bp, Bacillus circulans
ctttaaaagcttgcttttaa

SEQ ID NO: 40225 - DNA, 20 bp, Tissierella praeacuta
gattaataccttatgacact

SEQ ID NO: 40226 - DNA, 20 bp, Vibrio cholerae
acaaagtggcaagcgtcctc

SEQ ID NO: 40227 - DNA, 20 bp, Lactococcus lactis
tttaagtttgaaagatgcaa

SEQ ID NO: 40228 - DNA, 20 bp, Bacteroides uniformis
acagtagaggcaggcggaat

SEQ ID NO: 40229 - DNA, 20 bp, Streptococcus constellatus
cgtataagaacatttactgc

SEQ ID NO: 40230 - DNA, 20 bp, Aerococcus viridans
tttcttccgcatggaagaag

SEQ ID NO: 40231 - DNA, 20 bp, Corynebacterium glucuronolyticum
ataggaccgcatcgtggttg

SEQ ID NO: 40232 - DNA, 20 bp, Bacillus lentus
cctgtccccgaagggaagac

SEQ ID NO: 40233 - DNA, 20 bp, Granulicatella adiacens
caagtcgaacgagagcgacc

SEQ ID NO: 40234 - DNA, 20 bp, Morganella morganii
ctgatactggtcagctagag

SEQ ID NO: 40235 - DNA, 20 bp, Acinetobacter lwoffii
cgcgcgtaggtggccaatta

SEQ ID NO: 40236 - DNA, 20 bp, Bacillus oleronius
atgagggagaattgaaagat

SEQ ID NO: 40237 - DNA, 20 bp, Bacteroides distasonis
tcagagggggataacccggc

SEQ ID NO: 40238 - DNA, 20 bp, Actinomyces radingae
gtgtgcatttggttgggggt

SEQ ID NO: 40239 - DNA, 20 bp, Facklamia sourekii
actagaggatggtcccgcgg

SEQ ID NO: 40240 - DNA, 20 bp, Tetragenococcus halophilus
acccaaagtcggtgcggcaa

SEQ ID NO: 40241 - DNA, 20 bp, Campylobacter concisus
tacaccggaccgggccagag

SEQ ID NO: 40242 - DNA, 20 bp, Paenibacillus amylolyticus
ggaagaacgtccggtagagt

SEQ ID NO: 40243 - DNA, 20 bp, Paenibacillus thiaminolyticus
tcggaaactgtgtgacttga

SEQ ID NO: 40244 - DNA, 20 bp, Pediococcus inopinatus
aaccgcatggttttctttta

SEQ ID NO: 40245 - DNA, 20 bp, Leuconostoc lactis
tgtatctgatagtaactgat

SEQ ID NO: 40246 - DNA, 20 bp, Virgibacillus pantothenticus
gcggcatatgctgtcactta

SEQ ID NO: 40247 - DNA, 20 bp, Bacteroides uniformis
atagttaccatcaggttatg

SEQ ID NO: 40248 - DNA, 20 bp, Vibrio cholerae
ccacctgggcatatccggta

SEQ ID NO: 40249 - DNA, 20 bp, Corynebacterium urealyticum
ctaggtgtggggatttttca

SEQ ID NO: 40250 - DNA, 20 bp, Tetragenococcus halophilus
gctctgttgtcagcaaagaa

SEQ ID NO: 40251 - DNA, 20 bp, Leuconostoc pseudomesenteroides
cagctagaatagggaatgat

SEQ ID NO: 40252 - DNA, 20 bp, Arcanobacterium bernardiae
tcagtacagaacaaggcctt

SEQ ID NO: 40253 - DNA, 20 bp, Leptotrichia buccalis
aggcggccagacaagtctgg

SEQ ID NO: 40254 - DNA, 20 bp, Helcococcus kunzii
agagcaagcgaatcgcataa

SEQ ID NO: 40255 - DNA, 20 bp, Anaerococcus prevotii
caaagctccggcggtctaag

SEQ ID NO: 40256 - DNA, 20 bp, Bacteroides merdae
cgctgatagataggcatgcg

SEQ ID NO: 40257 - DNA, 20 bp, Propionibacterium freudenreichii
gagaatggaactctcggtgg

SEQ ID NO: 40258 - DNA, 20 bp, Peptostreptococcus anaerobius
gaaagatgagcggcggacgg

SEQ ID NO: 40259 - DNA, 20 bp, Prevotella bivia
gagataatgaggtccttcgg

SEQ ID NO: 40260 - DNA, 20 bp, Streptococcus parasanguinis
tgcttgcaccgagcggagga

SEQ ID NO: 40261 - DNA, 20 bp, Moraxella osloensis
agggaggagaggctaatggt

SEQ ID NO: 40262 - DNA, 20 bp, Facklamia sourekii
cgacggagaaacttgtttct

SEQ ID NO: 40263 - DNA, 20 bp, Ochrobactrum intermedium
ggaatctacccatcactagg

SEQ ID NO: 40264 - DNA, 20 bp, Propionibacterium avidum
tgggtttgacatggactggg

SEQ ID NO: 40265 - DNA, 20 bp, Photobacterium damselae
gtagttaacacctgcattat

SEQ ID NO: 40266 - DNA, 20 bp, Paenibacillus macerans
actcctgagagttagcggcg

SEQ ID NO: 40267 - DNA, 20 bp, Bacillus simplex
ccagagtaactgctggtacc

SEQ ID NO: 40268 - DNA, 20 bp, Brevibacillus choshinensis
cgctgaccctcctagagata

SEQ ID NO: 40269 - DNA, 20 bp, Clostridium tetani
aaaaccctgttttctgggac

SEQ ID NO: 40270 - DNA, 20 bp, Leptotrichia buccalis
agatcttgacatcctacgaa

SEQ ID NO: 40271 - DNA, 20 bp, Streptococcus thoraltensis
tacaacgagttgcgagctgg

SEQ ID NO: 40272 - DNA, 20 bp, Empedobacter brevis
gattaatcagtcagtggtga

SEQ ID NO: 40273 - DNA, 20 bp, Bacillus sp
ctctgacctccctagagata

SEQ ID NO: 40274 - DNA, 20 bp, Actinomyces bovis
catagaaactggtagactag

SEQ ID NO: 40275 - DNA, 20 bp, Anaerobiospirillum succiniciproducens
agtgccttcgggaacctaca

SEQ ID NO: 40276 - DNA, 20 bp, Dermacoccus nishinomiyaensis
tacaccggaatcatgcagag

SEQ ID NO: 40277 - DNA, 20 bp, Leuconostoc argentinum
atgatacaaagttgaaaggc

SEQ ID NO: 40278 - DNA, 20 bp, Acinetobacter lwoffii
ccgagattaatactcttgga

SEQ ID NO: 40279 - DNA, 20 bp, Corynebacterium glucuronolyticum
tggagctaatcgcgaaagcc

SEQ ID NO: 40280 - DNA, 20 bp, Capnocytophaga ochracea
gcatattactaacaattaat

SEQ ID NO: 40281 - DNA, 20 bp, Pseudomonas luteola
tcgggtcgtaaagcacttta

SEQ ID NO: 40282 - DNA, 20 bp, Eubacterium moniliforme
tcaacgatgggtagccgacc

SEQ ID NO: 40283 - DNA, 20 bp, Bacteroides distasonis
tacccgggtttgaacgcatt

SEQ ID NO: 40284 - DNA, 20 bp, Cardiobacterium hominis
ctgggcgactagagtatgaa

SEQ ID NO: 40285 - DNA, 20 bp, Bacillus schlegellii
taaacccctgttgtcgggga

SEQ ID NO: 40286 - DNA, 20 bp, Clostridium clostridiiforme
tttgctagagtgtcggagag

SEQ ID NO: 40287 - DNA, 20 bp, Proteus mirabilis
cgggcaggcctaacacatgc

SEQ ID NO: 40288 - DNA, 20 bp, Haemophilus influenzae
ttcggtattgaggaaggttg

SEQ ID NO: 40289 - DNA, 20 bp, Vagococcus fluvialis
cggtacaatgagtcgcgaga

SEQ ID NO: 40290 - DNA, 20 bp, Leuconostoc lactis
ggtgtagggttgaaagatgg

SEQ ID NO: 40291 - DNA, 20 bp, Streptococcus constellatus
ggatgcaccgtagtttacta

SEQ ID NO: 40292 - DNA, 20 bp, Streptococcus parasanguinis
tgcatgatgttgacttgaaa

SEQ ID NO: 40293 - DNA, 20 bp, Staphylococcus equorum
cgagcgaacggataaggagc

SEQ ID NO: 40294 - DNA, 20 bp, Veillonella atypica
ggagttaatagacggaagcg

SEQ ID NO: 40295 - DNA, 20 bp, Corynebacterium group ANF
gggtggtgacggtagtggta

SEQ ID NO: 40296 - DNA, 20 bp, Salmonella enteritidis
tccacagaagaatccagaga

SEQ ID NO: 40297 - DNA, 20 bp, Cardiobacterium hominis
acgcaggcggttgcccaagt

SEQ ID NO: 40298 - DNA, 20 bp, Bacteroides distasonis
cacctggcgacagggagcga

SEQ ID NO: 40299 - DNA, 20 bp, Streptococcus constellatus
aataccgtataagaacattt

SEQ ID NO: 40300 - DNA, 20 bp, Kingella denitrificans
gtttgtgccttcgggagccg

SEQ ID NO: 40301 - DNA, 20 bp, Brochothrix campestris
tggtaaccttcgggagctag

SEQ ID NO: 40302 - DNA, 20 bp, Alicyclobacillus acidocaldarius
tctccccgagcaacagagct

SEQ ID NO: 40303 - DNA, 20 bp, Aerococcus christensenii
ggaacctaccgataagcggg

SEQ ID NO: 40304 - DNA, 20 bp, Bacillus coagulans
taacctttacggagccagcc

SEQ ID NO: 40305 - DNA, 20 bp, Veillonella parvula
cggatcagtcagtctgtctt

SEQ ID NO: 40306 - DNA, 20 bp, Prevotella melaninogenica
aaacggcattgagtgcttgc

SEQ ID NO: 40307 - DNA, 20 bp, Lactococcus garvieae
tgtagggagctataagttct

SEQ ID NO: 40308 - DNA, 20 bp, Streptococcus dysgalactiae
gaatgatggtgggagtggaa

SEQ ID NO: 40309 - DNA, 20 bp, Bacteroides uniformis
tatgctggggactctgtcga

SEQ ID NO: 40310 - DNA, 20 bp, Cardiobacterium hominis
aatacctgcgcaattgacgt

SEQ ID NO: 40311 - DNA, 20 bp, Gemella morbillorum
gatatgtagtaactatacat

SEQ ID NO: 40312 - DNA, 20 bp, Enterococcus casseliflavus
gcatggaagaaagttgaaag

SEQ ID NO: 40313 - DNA, 20 bp, Facklamia hominis
aataccgcatagaatcgcag

SEQ ID NO: 40314 - DNA, 20 bp, Vagococcus fluvialis
agtgggagagtaactgttcc

SEQ ID NO: 40315 - DNA, 20 bp, Stenotrophomonas maltophilia
ttcggaccttgcactatcga

SEQ ID NO: 40316 - DNA, 20 bp, Gemella bergeri
tgttggtctcaaaagagatc

SEQ ID NO: 40317 - DNA, 20 bp, Bacillus halodurans
ggaccaaagggagcttgctc

SEQ ID NO: 40318 - DNA, 20 bp, Anaerococcus prevotii
gctccggcggtctaagatgg

SEQ ID NO: 40319 - DNA, 20 bp, Tissierella praeacuta
gtaaagcggtaaaagatggt

SEQ ID NO: 40320 - DNA, 20 bp, Fusobacterium necrophorum
gcgcgtctaggcggcaagga

SEQ ID NO: 40321 - DNA, 20 bp, Propionibacterium freudenreichii
tgcctttttggctggtacac

SEQ ID NO: 40322 - DNA, 20 bp, Tetragenococcus halophilus
cctagcgaatctctgaaagc

SEQ ID NO: 40323 - DNA, 20 bp, Clostridium botulinum
caaaacttataaaacctatc

SEQ ID NO: 40324 - DNA, 20 bp, Comamonas terrigena
gttaataccctggagtcatg

SEQ ID NO: 40325 - DNA, 20 bp, Bacillus mycoides
aatattttgaactgcatagt

SEQ ID NO: 40326 - DNA, 20 bp, Tissierella praeacuta
aagtcaaagcgtaaagcggt

SEQ ID NO: 40327 - DNA, 20 bp, Bacillus mycoides
tgaactgcatagttcgaaat

SEQ ID NO: 40328 - DNA, 20 bp, Clostridium butyricum
tgtagtaccgcatggtacag

SEQ ID NO: 40329 - DNA, 20 bp, Peptoniphilus asaccharolyticus
aatgcgtagatattaaaaag

SEQ ID NO: 40330 - DNA, 20 bp, Streptococcus gordonii
tttataccgtagcttgctac

SEQ ID NO: 40331 - DNA, 20 bp, Peptostreptococcus anaerobius
tcgaaggtggcgtcgataac

SEQ ID NO: 40332 - DNA, 20 bp, Haemophilus parainfluenzae
atttagtttaatagactaga

SEQ ID NO: 40333 - DNA, 20 bp, Clostridium septicum
gggaggtatcaactccttcc

SEQ ID NO: 40334 - DNA, 20 bp, Propionibacterium acnes
cgctttcgcctgtgacgaag

SEQ ID NO: 40335 - DNA, 20 bp, Methylobacterium mesophilicum
gcaccgcagtagcgcagcta

SEQ ID NO: 40336 - DNA, 20 bp, Clostridium innocuum
tacaatggcgaccacaaaga

SEQ ID NO: 40337 - DNA, 20 bp, Fusobacterium nucleatum
ttcagtgtcccttcggggaa

SEQ ID NO: 40338 - DNA, 20 bp, Campylobacter curvus
gactgctaataccttatact

SEQ ID NO: 40339 - DNA, 20 bp, Pediococcus inopinatus
catgcaagtcggacgcactt

SEQ ID NO: 40340 - DNA, 20 bp, Granulicatella elegans
agcgcaggcggtcaattaag

SEQ ID NO: 40341 - DNA, 20 bp, Prevotella melaninogenica
tgcagcgcatactggtttcc

SEQ ID NO: 40342 - DNA, 20 bp, Haemophilus influenzae
cggtattgaggaaggttgat

SEQ ID NO: 40343 - DNA, 20 bp, Corynebacterium coyleae
ctaatcgctgtaaagccggt

SEQ ID NO: 40344 - DNA, 20 bp, Prevotella denticola
aaggcagttcatatccggta

SEQ ID NO: 40345 - DNA, 20 bp, Weeksella virosa
aaatcctatcgcttaacgat

SEQ ID NO: 40346 - DNA, 20 bp, Burkholderia multivorans
cttggctctaatacagtcgg

SEQ ID NO: 40347 - DNA, 20 bp, Citrobacter freundii
atgactggggtgaagtccgt

SEQ ID NO: 40348 - DNA, 20 bp, Leptotrichia buccalis
ttcagcagggaagaagaaag

SEQ ID NO: 40349 - DNA, 20 bp, Paenibacillus pabuli
aacctgccctcaagtttggg

SEQ ID NO: 40350 - DNA, 20 bp, Empedobacter brevis
tactgttagtcttgagtgat

SEQ ID NO: 40351 - DNA, 20 bp, Serratia proteamaculans
tagcactgtgcattgacgtt

SEQ ID NO: 40352 - DNA, 20 bp, Tissierella praeacuta
tggtctcgcgtcccattagt

SEQ ID NO: 40353 - DNA, 20 bp, Bacillus oleronius
aggagaattgaaagatggct

SEQ ID NO: 40354 - DNA, 20 bp, Yersinia ruckeri
gtgttaatagcactgaacat

SEQ ID NO: 40355 - DNA, 20 bp, Acinetobacter calcoaceticus
ggaggctactgaagttaata

SEQ ID NO: 40356 - DNA, 20 bp, Streptococcus salivarius
aaggggcaaatgctccacta

SEQ ID NO: 40357 - DNA, 20 bp, Leuconostoc lactis
gtgtagggttgaaagatggt

SEQ ID NO: 40358 - DNA, 20 bp, Streptococcus parasanguinis
cttgcaccgagcggaggagt

SEQ ID NO: 40359 - DNA, 20 bp, Propionibacterium acnes
aaaccgctttcgcctgtgac

SEQ ID NO: 40360 - DNA, 20 bp, Facklamia sourekii
aagtcgtgaggccaagcgaa

SEQ ID NO: 40361 - DNA, 20 bp, Staphylococcus capitis
aaaggcctgcagcttgctgc

SEQ ID NO: 40362 - DNA, 20 bp, Prevotella loescheii
gcgaactggggcgcttgagt

SEQ ID NO: 40363 - DNA, 20 bp, Streptococcus pyogenes
atgttagtaatttaaaaggg

SEQ ID NO: 40364 - DNA, 20 bp, Peptostreptococcus anaerobius
ggcatcgtagatatatcaaa

SEQ ID NO: 40365 - DNA, 20 bp, Propionibacterium acnes
tgtaatcttggggcttaacc

SEQ ID NO: 40366 - DNA, 20 bp, Dermacoccus nishinomiyaensis
aagtttttgtggtgggggat

SEQ ID NO: 40367 - DNA, 20 bp, Brevibacillus brevis
ggataatccttttcctctca

SEQ ID NO: 40368 - DNA, 20 bp, Veillonella atypica
agttaatagacggaagcgaa

SEQ ID NO: 40369 - DNA, 20 bp, Stenotrophomonas maltophilia
actggatgactagaatgtgg

SEQ ID NO: 40370 - DNA, 20 bp, Alicyclobacillus acidocaldarius
gtccgccgctggcctccgaa

SEQ ID NO: 40371 - DNA, 20 bp, Prevotella melaninogenica
gtgtgttgtgaaatgtagac

SEQ ID NO: 40372 - DNA, 20 bp, Corynebacterium propinquum
tggctcaaactcgtttaggg

SEQ ID NO: 40373 - DNA, 20 bp, Anaerococcus tetradius
tcatcttgaggtatggaagg

SEQ ID NO: 40374 - DNA, 20 bp, Eggerthella lenta
tcaacccccggccggatccc

SEQ ID NO: 40375 - DNA, 20 bp, Streptococcus suis
gatttttcttcggaacactg

SEQ ID NO: 40376 - DNA, 20 bp, Arcanobacterium bernardiae
cttaacttcggggttgcagt

SEQ ID NO: 40377 - DNA, 20 bp, Bacteroides fragilis
tgatgtggaaacatgtcagt

SEQ ID NO: 40378 - DNA, 20 bp, Moraxella bovis
cgggagcttggatacaggtg

SEQ ID NO: 40379 - DNA, 20 bp, Streptococcus porcinus
ctaataccgcatgaaagtag

SEQ ID NO: 40380 - DNA, 20 bp, Corynebacterium coyleae
caccagatcgccgtagagat

SEQ ID NO: 40381 - DNA, 20 bp, Streptococcus constellatus
caccgtagtttactacaccg

SEQ ID NO: 40382 - DNA, 20 bp, Helcococcus ovis
aacgagaattttttaattaa

SEQ ID NO: 40383 - DNA, 20 bp, Bacteroides uniformis
tagaactattaaagaatttc

SEQ ID NO: 40384 - DNA, 20 bp, Anaerobiospirillum succiniciproducens
gagggaaacgataccgtgag

SEQ ID NO: 40385 - DNA, 20 bp, Fusobacterium nucleatum
agatatttcagtgtcccttc

SEQ ID NO: 40386 - DNA, 20 bp, Anaerococcus tetradius
caaaactcaaaaagcctgtc

SEQ ID NO: 40387 - DNA, 20 bp, Fusobacterium nucleatum
gagatatttcagtgtccctt

SEQ ID NO: 40388 - DNA, 20 bp, Unknown Organism
  oligonucleotide from CDC group EF-4B
aataccgcatacactttgag

SEQ ID NO: 40389 - DNA, 20 bp, Achromobacter xylosoxidans
aataccccgcggaactgacg

SEQ ID NO: 40390 - DNA, 20 bp, Propionibacterium acnes
accgttgtgggggagccgtc

SEQ ID NO: 40391 - DNA, 20 bp, Streptococcus equi
ggtgaagtcgtacaaggtag

SEQ ID NO: 40392 - DNA, 20 bp, Streptococcus canis
ccgcataaaagtgcttaaca

SEQ ID NO: 40393 - DNA, 20 bp, Moraxella osloensis
gaagtaggtagcctaacgaa

SEQ ID NO: 40394 - DNA, 20 bp, Streptococcus bovis
gtagaaggagttgcgaacgg

SEQ ID NO: 40395 - DNA, 20 bp, Eggerthella lenta
acgtgaccaacctgcccctt

SEQ ID NO: 40396 - DNA, 20 bp, Bacillus lentus
gccggcagtcgctctagagt

SEQ ID NO: 40397 - DNA, 20 bp, Paenibacillus apiarius
ctcctgatgcttagcggcgg

SEQ ID NO: 40398 - DNA, 20 bp, Moraxella osloensis
ggagaggctaatggttaata

SEQ ID NO: 40399 - DNA, 20 bp, Bacteroides uniformis
cttgctaagtttgatggcga

SEQ ID NO: 40400 - DNA, 20 bp, Bacteroides stercoris
aaccgacgatggataggggt

SEQ ID NO: 40401 - DNA, 20 bp, Anaerococcus prevotii
gccttagacattgggatagc

SEQ ID NO: 40402 - DNA, 20 bp, Porphyromonas endodontalis
acacagaacgccgattgcga

SEQ ID NO: 40403 - DNA, 20 bp, Virgibacillus pantothenticus
catatgctgtcacttacaga

SEQ ID NO: 40404 - DNA, 20 bp, Virgibacillus pantothenticus
acgagatgttgaaaggcggc

SEQ ID NO: 40405 - DNA, 20 bp, Clostridium innocuum
cgtactacaatggcgaccac

SEQ ID NO: 40406 - DNA, 20 bp, Streptococcus anginosus
gaatggaaagttcatactgt

SEQ ID NO: 40407 - DNA, 20 bp, Actinomyces bovis
tgcaagtcgaacgaagtgaa

SEQ ID NO: 40408 - DNA, 20 bp, Corynebacterium glucuronolyticum
ggcattgcttgagtgctgta

SEQ ID NO: 40409 - DNA, 20 bp, Veillonella atypica
cctcttcttcggaagccaga

SEQ ID NO: 40410 - DNA, 20 bp, Listeria innocua
ctaataccgaatgatagagt

SEQ ID NO: 40411 - DNA, 20 bp, Lactococcus lactis
gctcatcaagtgacggtaac

SEQ ID NO: 40412 - DNA, 20 bp, Bacillus simplex
ttcttttctcgcatgagaga

SEQ ID NO: 40413 - DNA, 20 bp, Peptostreptococcus anaerobius
cccttagaccggtgtttaat

SEQ ID NO: 40414 - DNA, 20 bp, Actinomyces bovis
gcttcttatatgacggtacc

SEQ ID NO: 40415 - DNA, 20 bp, Brochothrix campestris
cctcacagctggggataaca

SEQ ID NO: 40416 - DNA, 20 bp, Kytococcus sedentarius
gctgtgaaaattcagggctt

SEQ ID NO: 40417 - DNA, 20 bp, Prevotella oris
taaagtgagggacgtgtcct

SEQ ID NO: 40418 - DNA, 20 bp, Bacteroides vulgatus
agagggccgctaccacgcga

SEQ ID NO: 40419 - DNA, 20 bp, Kingella denitrificans
gaagaaaagggaagtgttaa

SEQ ID NO: 40420 - DNA, 20 bp, Vibrio hollisae
ggaatccgccagaagtgggt

SEQ ID NO: 40421 - DNA, 20 bp, Burkholderia cepacia
ttggctctaatacagccggg

SEQ ID NO: 40422 - DNA, 20 bp, Bacillus azotoformans
ggaagaacaagtaccagtta

SEQ ID NO: 40423 - DNA, 20 bp, Anaerococcus prevotii
tgttcagttaagtctggcaa

SEQ ID NO: 40424 - DNA, 20 bp, Vibrio cholerae
cttgtcagtttcaaatgcga

SEQ ID NO: 40425 - DNA, 20 bp, Bifidobacterium adolescentis
gcttggcggcaggcctaaca

SEQ ID NO: 40426 - DNA, 20 bp, Anaerococcus tetradius
ggcctagtaagttagaagtg

SEQ ID NO: 40427 - DNA, 20 bp, Serratia marcescens
cttaatacgctcatcaattg

SEQ ID NO: 40428 - DNA, 20 bp, Bacteroides uniformis
ttgcaactgaatgatgtgga

SEQ ID NO: 40429 - DNA, 20 bp, Pseudomonas luteola
tgaatcagaacgtcacggtg

SEQ ID NO: 40430 - DNA, 20 bp, Corynebacterium coyleae
accacattttggatggtgtg

SEQ ID NO: 40431 - DNA, 20 bp, Paenibacillus lautus
tcttctagagtaactgctag

SEQ ID NO: 40432 - DNA, 20 bp, Paenibacillus lautus
gcattgtggaataatgaaag

SEQ ID NO: 40433 - DNA, 20 bp, Bacillus sp
ttccacatgcgtcacccccg

SEQ ID NO: 40434 - DNA, 20 bp, Leuconostoc lactis
aaaacctaacaccgcatggt

SEQ ID NO: 40435 - DNA, 20 bp, Campylobacter concisus
cagagatggtctttccccct

SEQ ID NO: 40436 - DNA, 20 bp, Acinetobacter genospecies 3
ctaactgcaaagagggcggt

SEQ ID NO: 40437 - DNA, 20 bp, Eikenella corrodens
ctaataccactttttgctga

SEQ ID NO: 40438 - DNA, 20 bp, Prevotella intermedia
tacagttccaaaagcttact

SEQ ID NO: 40439 - DNA, 20 bp, Campylobacter curvus
gctatgggatgaggctatat

SEQ ID NO: 40440 - DNA, 20 bp, Facklamia sourekii
gtcgtgaggccaagcgaatc

SEQ ID NO: 40441 - DNA, 20 bp, Fusobacterium necrogenes
tcaaactagagtactggaga

SEQ ID NO: 40442 - DNA, 20 bp, Anaerococcus tetradius
atagttccttacttcttcgg

SEQ ID NO: 40443 - DNA, 20 bp, Bacillus halodurans
accaaagggagcttgctcct

SEQ ID NO: 40444 - DNA, 20 bp, Corynebacterium xerosis
gctggggtacacgagtggcg

SEQ ID NO: 40445 - DNA, 20 bp, Prevotella intermedia
cagttccaaaagcttactac

SEQ ID NO: 40446 - DNA, 20 bp, Aeromonas schubertii
gcgaatccctaaaagcgcgt

SEQ ID NO: 40447 - DNA, 20 bp, Bacillus alcalophilus
gctcaaccccgaggggtcat

SEQ ID NO: 40448 - DNA, 20 bp, Bacillus schlegellii
tgggcctttcccgcgaggga

SEQ ID NO: 40449 - DNA, 20 bp, Alicyclobacillus acidocaldarius
catgccgctctccccgagca

SEQ ID NO: 40450 - DNA, 20 bp, Empedobacter brevis
ttacgcagaacaccaattgc

SEQ ID NO: 40451 - DNA, 20 bp, Campylobacter coli
acactagttgttggggtgct

SEQ ID NO: 40452 - DNA, 20 bp, Pseudoramibacter alactolyticus
ttgtcgcatggcaagatcat

SEQ ID NO: 40453 - DNA, 20 bp, Acinetobacter baumannii
aggtagcttgctaccggacc

SEQ ID NO: 40454 - DNA, 20 bp, Peptoniphilus indolicus
aaagtcagatgtgaaaggcg

SEQ ID NO: 40455 - DNA, 20 bp, Dermacoccus nishinomiyaensis
caccagcttgctggtgtgga

SEQ ID NO: 40456 - DNA, 20 bp, Prevotella melaninogenica
tgaaatgtagacgctcaacg

SEQ ID NO: 40457 - DNA, 20 bp, Granulicatella adiacens
actggtcaatctagtggcga

SEQ ID NO: 40458 - DNA, 20 bp, Clostridium paraputrificum
tgaagtagcaattaaaggag

SEQ ID NO: 40459 - DNA, 20 bp, Veillonella atypica
ttcttcggaagccagaaaac

SEQ ID NO: 40460 - DNA, 20 bp, Citrobacter sedlakii
acggaagactgcagagatgc

SEQ ID NO: 40461 - DNA, 20 bp, Brevibacillus choshinensis
cggcttcggctgtcactggg

SEQ ID NO: 40462 - DNA, 20 bp, Weeksella virosa
ctaccaggtgactggatgcg

SEQ ID NO: 40463 - DNA, 20 bp, Streptococcus agalactiae
tagaacgctgaggtttggtg

SEQ ID NO: 40464 - DNA, 20 bp, Clostridium limosum
actaggtgtcggggtttcaa

SEQ ID NO: 40465 - DNA, 20 bp, Paenibacillus peoriae
aagcttgcttctaaacaacc

SEQ ID NO: 40466 - DNA, 20 bp, Eikenella corrodens
agaaaagggaagtgctaata

SEQ ID NO: 40467 - DNA, 20 bp, Clostridium botulinum
tatcaaagatttattgcttt

SEQ ID NO: 40468 - DNA, 20 bp, Streptococcus criceti
gttgtaagagaagaacgttg

SEQ ID NO: 40469 - DNA, 20 bp, Corynebacterium propinquum
ttgggacgaagtcgtaaaca

SEQ ID NO: 40470 - DNA, 20 bp, Bacteroides vulgatus
gggccgctaccacgcgagtg

SEQ ID NO: 40471 - DNA, 20 bp, Paenibacillus amylolyticus
cttggttcgcactggaaact

SEQ ID NO: 40472 - DNA, 20 bp, Bacillus megaterium
cgtaacaaggtagccgatcg

SEQ ID NO: 40473 - DNA, 20 bp, Vagococcus fluvialis
tgggagagtaactgttccca

SEQ ID NO: 40474 - DNA, 20 bp, Microbacterium hominis
atggtcagtagctggaaaga

SEQ ID NO: 40475 - DNA, 20 bp, Myroides odoratus
aaattcggattaatgctcca

SEQ ID NO: 40476 - DNA, 20 bp, Helcococcus ovis
catatacagggatatactag

SEQ ID NO: 40477 - DNA, 20 bp, Peptostreptococcus anaerobius
tggtctttcaagtcggtggt

SEQ ID NO: 40478 - DNA, 20 bp, Prevotella denticola
caccacactaaaggcagttc

SEQ ID NO: 40479 - DNA, 20 bp, Campylobacter lari
ggctgctaatactctatact

SEQ ID NO: 40480 - DNA, 20 bp, Clostridium botulinum
agagaatcgcatgattttct

SEQ ID NO: 40481 - DNA, 20 bp, Acinetobacter genospecies 3
agcggagagaggtagcttgc

SEQ ID NO: 40482 - DNA, 20 bp, Moraxella osloensis
atattgacactgagattcga

SEQ ID NO: 40483 - DNA, 20 bp, Staphylococcus aureus
gagcgaacggacgagaagct

SEQ ID NO: 40484 - DNA, 20 bp, Lactococcus lactis
ctcaaagatgatcccgcgtt

SEQ ID NO: 40485 - DNA, 20 bp, Acinetobacter genospecies 3
ggttagctagagtgtgggag

SEQ ID NO: 40486 - DNA, 20 bp, Arcanobacterium bernardiae
actgcgatgtgccagagatg

SEQ ID NO: 40487 - DNA, 20 bp, Fusobacterium mortiferum
accggatattatgtgagttt

SEQ ID NO: 40488 - DNA, 20 bp, Brochothrix campestris
agacttgaggacagaagagg

SEQ ID NO: 40489 - DNA, 20 bp, Kingella denitrificans
ataccactttttgttgacgg

SEQ ID NO: 40490 - DNA, 20 bp, Brevundimonas diminuta
gaccgccacggagacgtggc

SEQ ID NO: 40491 - DNA, 20 bp, Vagococcus fluvialis
taatggcctaccaagaccgt

SEQ ID NO: 40492 - DNA, 20 bp, Fusobacterium varium
aagttaacagagatgttttc

SEQ ID NO: 40493 - DNA, 20 bp, Peptoniphilus indolicus
tactggtcacaaactgacgc

SEQ ID NO: 40494 - DNA, 20 bp, Corynebacterium amycolatum
tgtggatgctgtggtggaaa

SEQ ID NO: 40495 - DNA, 20 bp, Shewanella algae
atttgcccatttgtggggga

SEQ ID NO: 40496 - DNA, 20 bp, Corynebacterium glucuronolyticum
ggcttaacttttggttggca

SEQ ID NO: 40497 - DNA, 20 bp, Staphylococcus aureus
agtcgagcgaacggacgaga

SEQ ID NO: 40498 - DNA, 20 bp, Propionibacterium freudenreichii
atgagcctggcctgcatggg

SEQ ID NO: 40499 - DNA, 20 bp, Vibrio cholerae
aatgattaaggtattaactt

SEQ ID NO: 40500 - DNA, 20 bp, Eggerthella lenta
cggatcccgaactgggaggc

SEQ ID NO: 40501 - DNA, 20 bp, Campylobacter lari
gttgttggggtgctagtcat

SEQ ID NO: 40502 - DNA, 20 bp, Clostridium histolyticum
ggtactaggtgtcggggttt

SEQ ID NO: 40503 - DNA, 20 bp, Prevotella oris
agggataacccgtcgaaagt

SEQ ID NO: 40504 - DNA, 20 bp, Tetragenococcus halophilus
cgctgcttaagaagaaactt

SEQ ID NO: 40505 - DNA, 20 bp, Paenibacillus thiaminolyticus
tcgatttcctcgcatgaggg

SEQ ID NO: 40506 - DNA, 20 bp, Brochothrix campestris
ataagatgttcaagtgaaag

SEQ ID NO: 40507 - DNA, 20 bp, Stenotrophomonas maltophilia
gaaagaaatccagctggtta

SEQ ID NO: 40508 - DNA, 20 bp, Bacillus alcalophilus
accggataatcaaaggaatc

SEQ ID NO: 40509 - DNA, 20 bp, Rothia dentocariosa
gacatgcattagatcgcgtc

SEQ ID NO: 40510 - DNA, 20 bp, Comamonas terrigena
accttgtgctactagagcgg

SEQ ID NO: 40511 - DNA, 20 bp, Bacteroides thetaiotaomicron
accaaaccttcgatggatag

SEQ ID NO: 40512 - DNA, 20 bp, Weeksella virosa
tgaaggtagcatatgaataa

SEQ ID NO: 40513 - DNA, 20 bp, Facklamia ignava
taataccgcatagttgttcc

SEQ ID NO: 40514 - DNA, 20 bp, Vibrio cholerae
ctacagtactctagcttgtc

SEQ ID NO: 40515 - DNA, 20 bp, Moraxella bovis
tagtgccttcgggagcttgg

SEQ ID NO: 40516 - DNA, 20 bp, Corynebacterium afermentans
gacgtttcctctatatgtca

SEQ ID NO: 40517 - DNA, 20 bp, Corynebacterium falsenii
agaagccacttgtggtgacg

SEQ ID NO: 40518 - DNA, 20 bp, Corynebacterium renale
atgctaatcgctgaaagccg

SEQ ID NO: 40519 - DNA, 20 bp, Arcanobacterium bernardiae
ttcatcgcatggtgggggtt

SEQ ID NO: 40520 - DNA, 20 bp, Corynebacterium group F
caactttttggatattgttg

SEQ ID NO: 40521 - DNA, 20 bp, Brevibacterium linens
ttgacatacaccagaccgtt

SEQ ID NO: 40522 - DNA, 20 bp, Geobacillus thermoglucosidasius
gagcttgcttccgcttggtt

SEQ ID NO: 40523 - DNA, 20 bp, Acinetobacter radioresistens
aaggtagcttgctactggat

SEQ ID NO: 40524 - DNA, 20 bp, Bacillus sp
ctgacggccctagagatagg

SEQ ID NO: 40525 - DNA, 20 bp, Weeksella virosa
cgcttaacgatagaactgcc

SEQ ID NO: 40526 - DNA, 20 bp, Weeksella virosa
gccagcgtttaaagacgggg

SEQ ID NO: 40527 - DNA, 20 bp, Bacteroides vulgatus
gagtggatgccaatccccaa

SEQ ID NO: 40528 - DNA, 20 bp, Microbacterium hominis
tagaaatacgggactctttg

SEQ ID NO: 40529 - DNA, 20 bp, Streptococcus canis
tgttaagaacttaaaagggg

SEQ ID NO: 40530 - DNA, 20 bp, Salmonella choleraesuis
gtagtccggactggagtctg

SEQ ID NO: 40531 - DNA, 20 bp, Vibrio cholerae
cccacctgggcatatccggt

SEQ ID NO: 40532 - DNA, 20 bp, Paenibacillus popilliae
ggaggaaaggcggagcaatc

SEQ ID NO: 40533 - DNA, 20 bp, Dermabacter hominis
aaaactcgaggcttaacctt

SEQ ID NO: 40534 - DNA, 20 bp, Brevibacillus choshinensis
gagcggaccaatgaagagct

SEQ ID NO: 40535 - DNA, 20 bp, Rothia mucilaginosa
atacgaccaatctccgcatg

SEQ ID NO: 40536 - DNA, 20 bp, Facklamia ignava
ggctcaaccgtggagttgca

SEQ ID NO: 40537 - DNA, 20 bp, Alcaligenes faecalis
agcgtgtgtaggcggttcgg

SEQ ID NO: 40538 - DNA, 20 bp, Arcanobacterium bernardiae
tggtaggggtaattggaatt

SEQ ID NO: 40539 - DNA, 20 bp, Bacillus oleronius
cctccctagagatagggatt

SEQ ID NO: 40540 - DNA, 20 bp, Clostridium botulinum
tacaataagacgcaagaccg

SEQ ID NO: 40541 - DNA, 20 bp, Corynebacterium glucuronolyticum
ctgggggataagcttgggaa

SEQ ID NO: 40542 - DNA, 20 bp, Campylobacter lari
tcgaacggagtattaagaga

SEQ ID NO: 40543 - DNA, 20 bp, Haemophilus segnis
aaggcatttagtttaataga

SEQ ID NO: 40544 - DNA, 20 bp, Actinomyces neuii
agcgacgtcgtgtgggggat

SEQ ID NO: 40545 - DNA, 20 bp, Fusobacterium nucleatum
attatgattttaaggcatct

SEQ ID NO: 40546 - DNA, 20 bp, Prevotella bivia
gatgaacgatttagagataa

SEQ ID NO: 40547 - DNA, 20 bp, Dolosicoccus paucivorans
tgcatagcttagagataagt

SEQ ID NO: 40548 - DNA, 20 bp, Tissierella praeacuta
tgagatttaagtcaaagcgt

SEQ ID NO: 40549 - DNA, 20 bp, Prevotella melaninogenica
aggcagctgacgggagcgca

SEQ ID NO: 40550 - DNA, 20 bp, Brevibacillus choshinensis
cctcctagagataggagctc

SEQ ID NO: 40551 - DNA, 20 bp, Enterobacter cloacae
cagggttaataaccctgtcg

SEQ ID NO: 40552 - DNA, 20 bp, Neisseria subflava
gtctgtacacaccgcccgtc

SEQ ID NO: 40553 - DNA, 20 bp, Streptococcus suis
gataggatttttcttcggaa

SEQ ID NO: 40554 - DNA, 20 bp, Bacteroides thetaiotaomicron
tcatgctgaggactctggag

SEQ ID NO: 40555 - DNA, 20 bp, Bacteroides fragilis
cagtggaatgatgtggaaac

SEQ ID NO: 40556 - DNA, 20 bp, Tissierella praeacuta
ccttatgacacttaaatgtc

SEQ ID NO: 40557 - DNA, 20 bp, Campylobacter concisus
ggttggatgccattgtggaa

SEQ ID NO: 40558 - DNA, 20 bp, Peptoniphilus indolicus
ggaacaaagagcgggcaagc

SEQ ID NO: 40559 - DNA, 20 bp, Pediococcus dextrinicus
aaactctgttattggagaag

SEQ ID NO: 40560 - DNA, 20 bp, Bacillus pallidus
gaaaaccgcatggttttcgg

SEQ ID NO: 40561 - DNA, 20 bp, Geobacillus thermoglucosidasius
acaaccctggagacagggcg

SEQ ID NO: 40562 - DNA, 20 bp, Lactococcus garvieae
ggtcttgacatactcgtgct

SEQ ID NO: 40563 - DNA, 20 bp, Clostridium subterminale
gtggagccaaactataaaat

SEQ ID NO: 40564 - DNA, 20 bp, Ralstonia paucula
tggctaatacctggggtaga

SEQ ID NO: 40565 - DNA, 20 bp, Vibrio cholerae
ggtattaacttaaccacctt

SEQ ID NO: 40566 - DNA, 20 bp, Actinomyces meyeri
ttctttgggataacgcccgg

SEQ ID NO: 40567 - DNA, 20 bp, Methylobacterium mesophilicum
tggcgtgttatggggagaga

SEQ ID NO: 40568 - DNA, 20 bp, Moraxella  catarrhalis
tgggtcttttaaagacttag

SEQ ID NO: 40569 - DNA, 20 bp, Haemophilus actinomycetomicans
cagaaagtgcgtctaagttc

SEQ ID NO: 40570 - DNA, 20 bp, Facklamia ignava
gtcgcatgactggaatggga

SEQ ID NO: 40571 - DNA, 20 bp, Facklamia ignava
ttgacggtaactgatcagaa

SEQ ID NO: 40572 - DNA, 20 bp, Clostridium ramosum
caggagaggatcgtggaatt

SEQ ID NO: 40573 - DNA, 20 bp, Gemella haemolysans
tatgagatggctttgcggtg

SEQ ID NO: 40574 - DNA, 20 bp, Bacteroides thetaiotaomicron
gttccattagtttgttggcg

SEQ ID NO: 40575 - DNA, 20 bp, Leptotrichia buccalis
aagatagttcactggacggt

SEQ ID NO: 40576 - DNA, 20 bp, Acinetobacter baumannii
ctactggacctagcggcgga

SEQ ID NO: 40577 - DNA, 20 bp, Tissierella praeacuta
cggtacaacgagcagctact

SEQ ID NO: 40578 - DNA, 20 bp, Fusobacterium nucleatum
ttatgattttaaggcatctt

SEQ ID NO: 40579 - DNA, 20 bp, Streptococcus sobrinus
ttagtgccgacgctaacgca

SEQ ID NO: 40580 - DNA, 20 bp, Corynebacterium glucuronolyticum
tttttttgacggtacctgga

SEQ ID NO: 40581 - DNA, 20 bp, Leuconostoc pseudomesenteroides
accttttaggaaggagccgt

SEQ ID NO: 40582 - DNA, 20 bp, Eggerthella lenta
agcccgcgatgggtagccgg

SEQ ID NO: 40583 - DNA, 20 bp, Clostridium ramosum
agcactggtagaggatggac

SEQ ID NO: 40584 - DNA, 20 bp, Bacillus coagulans
ccagatagttttttcctccg

SEQ ID NO: 40585 - DNA, 20 bp, Staphylococcus aureus
gcaagcttctcgtccgttcg

SEQ ID NO: 40586 - DNA, 20 bp, Proteus vulgaris
gaccaaagcaggggctcttc

SEQ ID NO: 40587 - DNA, 20 bp, Bacillus megaterium
tcatgggagatgattgaaag

SEQ ID NO: 40588 - DNA, 20 bp, Methylobacterium mesophilicum
ggcgtgttatggggagagat

SEQ ID NO: 40589 - DNA, 20 bp, Bacteroides merdae
caatggcatggacaaagggc

SEQ ID NO: 40590 - DNA, 20 bp, Kingella denitrificans
tcttgacatgtacggaagaa

SEQ ID NO: 40591 - DNA, 20 bp, Pseudoramibacter alactolyticus
tatggttttgtcgcatggca

SEQ ID NO: 40592 - DNA, 20 bp, Campylobacter sputorum
gctaacagttaggctgagca

SEQ ID NO: 40593 - DNA, 20 bp, Veillonella atypica
gttcctcttcttcggaagcc

SEQ ID NO: 40594 - DNA, 20 bp, Propionibacterium avidum
tgggtatgcctccttgtggg

SEQ ID NO: 40595 - DNA, 20 bp, Gemella haemolysans
agcattaactgcatggttga

SEQ ID NO: 40596 - DNA, 20 bp, Pediococcus pentosaceus
ctctgctatcacttctggat

SEQ ID NO: 40597 - DNA, 20 bp, Anaerococcus tetradius
gcggataagcaagttagaag

SEQ ID NO: 40598 - DNA, 20 bp, Aerococcus viridans
gtcgcaaacccgcgagggca

SEQ ID NO: 40599 - DNA, 20 bp, Bacteroides merdae
acaggggtcccgcatgggaa

SEQ ID NO: 40600 - DNA, 20 bp, Corynebacterium falsenii
gaagaagccacttgtggtga

SEQ ID NO: 40601 - DNA, 20 bp, Brevundimonas diminuta
ccacggagacgtggctttcc

SEQ ID NO: 40602 - DNA, 20 bp, Haemophilus actinemycetemcomitans
tgggaatctgtcttatggag

SEQ ID NO: 40603 - DNA, 20 bp, Corynebacterium ulcerans
catatacaagatcggcgtag

SEQ ID NO: 40604 - DNA, 20 bp, Clostridium ramosum
actggtagaggatggactta

SEQ ID NO: 40605 - DNA, 20 bp, Fusobacterium varium
gtctaggcggtttagtaagt

SEQ ID NO: 40606 - DNA, 20 bp, Bacteroides uniformis
cgatgactcggggatagcct

SEQ ID NO: 40607 - DNA, 20 bp, Brevibacillus choshinensis
ccgtggagggccacttgaaa

SEQ ID NO: 40608 - DNA, 20 bp, Oligella ureolytica
aaaagtcttaggctaatacc

SEQ ID NO: 40609 - DNA, 20 bp, Cardiobacterium hominis
cccaagtcagatgtgaaagc

SEQ ID NO: 40610 - DNA, 20 bp, Campylobacter sputorum
gttgttgctgtgctagtcat

SEQ ID NO: 40611 - DNA, 20 bp, Dietzia maris
agacttgagtgtttcagggg

SEQ ID NO: 40612 - DNA, 20 bp, Prevotella loescheii
tcggtgaccaagcgaaagcg

SEQ ID NO: 40613 - DNA, 20 bp, Fusobacterium mortiferum
cgtttgacatcctaagaaat

SEQ ID NO: 40614 - DNA, 20 bp, Acinetobacter johnsonii
ggaaaggtagcttgctacct

SEQ ID NO: 40615 - DNA, 20 bp, Clostridium glycolicum
acctgcctcatacacatgga

SEQ ID NO: 40616 - DNA, 20 bp, Streptococcus thermophilus
tgcaccgagcggatgagttg

SEQ ID NO: 40617 - DNA, 20 bp, Ignavigranum ruoffiae
gaaggagcttgcttcttccg

SEQ ID NO: 40618 - DNA, 20 bp, Anaerococcus prevotii
aaagtctttcccagttcgga

SEQ ID NO: 40619 - DNA, 20 bp, Weeksella virosa
aatgggttagcgcctgatcc

SEQ ID NO: 40620 - DNA, 20 bp, Kingella denitrificans
accactttttgttgacggta

SEQ ID NO: 40621 - DNA, 20 bp, Bacillus simplex
gcatgagagaagatggaaag

SEQ ID NO: 40622 - DNA, 20 bp, Aerococcus viridans
cgagggcaagcaaatctctc

SEQ ID NO: 40623 - DNA, 20 bp, Prevotella intermedia
tgtgcttgcacattctggac

SEQ ID NO: 40624 - DNA, 20 bp, Brevibacillus choshinensis
tcgagcggaccaatgaagag

SEQ ID NO: 40625 - DNA, 20 bp, Paenibacillus glucanolyticus
ctatgagagtgacggtactt

SEQ ID NO: 40626 - DNA, 20 bp, Clostridium paraputrificum
gccggtacaacgagatgcaa

SEQ ID NO: 40627 - DNA, 20 bp, Eikenella corrodens
aagcaggtagggtaaccgca

SEQ ID NO: 40628 - DNA, 20 bp, Kingella denitrificans
gtcctgagggggaaagcagg

SEQ ID NO: 40629 - DNA, 20 bp, Streptococcus equi
gctattcttagagataagaa

SEQ ID NO: 40630 - DNA, 20 bp, Paenibacillus pabuli
acgaatcctaaaaagccggt

SEQ ID NO: 40631 - DNA, 20 bp, Corynebacterium jeikeium
caaggggtactcgagtggcg

SEQ ID NO: 40632 - DNA, 20 bp, Prevotella denticola
accaccacactaaaggcagt

SEQ ID NO: 40633 - DNA, 20 bp, Aerococcus viridans
tgaccttgcggtgcattagt

SEQ ID NO: 40634 - DNA, 20 bp, Streptococcus anginosus
aaggaagaacgagtgtgaga

SEQ ID NO: 40635 - DNA, 20 bp, Bacillus alcalophilus
cacatggttcttttgtaaaa

SEQ ID NO: 40636 - DNA, 20 bp, Acinetobacter junii
ggaggaggctactgagacta

SEQ ID NO: 40637 - DNA, 20 bp, Actinomyces naeslundii
tgctccggagacggggtttc

SEQ ID NO: 40638 - DNA, 20 bp, Peptostreptococcus anaerobius
ggtgtttaatcacaccttcc

SEQ ID NO: 40639 - DNA, 20 bp, Clostridium clostridiiforme
cttgattgactgagtggcgg

SEQ ID NO: 40640 - DNA, 20 bp, Bacillus lentus
gcaagcttcttattggttcg

SEQ ID NO: 40641 - DNA, 20 bp, Tissierella praeacuta
aatgaaactttaattatctt

SEQ ID NO: 40642 - DNA, 20 bp, Delftia acidovorans
acgagaggcccatgacggta

SEQ ID NO: 40643 - DNA, 20 bp, Moraxella osloensis
cgatgactctctagcttgct

SEQ ID NO: 40644 - DNA, 20 bp, Weeksella virosa
gcagaataccaattgcgaag

SEQ ID NO: 40645 - DNA, 20 bp, Paenibacillus popilliae
gccttgtagagtaactgcta

SEQ ID NO: 40646 - DNA, 20 bp, Dermabacter hominis
gtgcttgcacagtggattag

SEQ ID NO: 40647 - DNA, 20 bp, Burkholderia cepacia
tccttggctctaatacagcc

SEQ ID NO: 40648 - DNA, 20 bp, Gemella bergeri
atttctggtgcttgcactag

SEQ ID NO: 40649 - DNA, 20 bp, Paenibacillus apiarius
tgtaagttgggtgtttaaac

SEQ ID NO: 40650 - DNA, 20 bp, Corynebacterium amycolatum
gtgtggatgctgtggtggaa

SEQ ID NO: 40651 - DNA, 20 bp, Rahnella aquatilis
aaggcatcacacttaatacg

SEQ ID NO: 40652 - DNA, 20 bp, Corynebacterium coyleae
gggtgtgctaatcgctgaaa

SEQ ID NO: 40653 - DNA, 20 bp, Burkholderia gladioli
aaagaaatcctgagggctaa

SEQ ID NO: 40654 - DNA, 20 bp, Eggerthella lenta
agggaagaaattcgacggta

SEQ ID NO: 40655 - DNA, 20 bp, Gemella haemolysans
tgctaacactatgagatggc

SEQ ID NO: 40656 - DNA, 20 bp, Weissella paramesenteroides
ttataagagaagaacggcac

SEQ ID NO: 40657 - DNA, 20 bp, Campylobacter curvus
ccggttatggtccacagtgg

SEQ ID NO: 40658 - DNA, 20 bp, Neisseria flavescens
ctgttgctaatatcgacagc

SEQ ID NO: 40659 - DNA, 20 bp, Paenibacillus larvae
tgaaagacggggcaacctgt

SEQ ID NO: 40660 - DNA, 20 bp, Alicyclobacillus acidocaldarius
tccccgcctcaacgcgctgg

SEQ ID NO: 40661 - DNA, 20 bp, Anaerococcus tetradius
atagctcaactatagtaagc

SEQ ID NO: 40662 - DNA, 20 bp, Anaerococcus prevotii
tactgtaagcatttgaaact

SEQ ID NO: 40663 - DNA, 20 bp, Actinomyces odontolyticus
ggtggcatttagttggtcgt

SEQ ID NO: 40664 - DNA, 20 bp, Streptococcus canis
ggaaaacccattatgtgacg

SEQ ID NO: 40665 - DNA, 20 bp, Campylobacter rectus
gtaaactccttttcttggga

SEQ ID NO: 40666 - DNA, 20 bp, Bacteroides forsythus
gggattgaaatgtagacgac

SEQ ID NO: 40667 - DNA, 20 bp, Brevibacillus laterosporus
tgtaagactgggataacata

SEQ ID NO: 40668 - DNA, 20 bp, Aerococcus viridans
gcataatatcttcttccgca

SEQ ID NO: 40669 - DNA, 20 bp, Rhizobium radiobacter
gggtttgggcagtggagaca

SEQ ID NO: 40670 - DNA, 20 bp, Suttonella indologenes
ataacacttacgagtcaaag

SEQ ID NO: 40671 - DNA, 20 bp, Bacillus flexus
ttctatgacgttagcggcgg

SEQ ID NO: 40672 - DNA, 20 bp, Clostridium ramosum
ctgcatggtgaccgtattaa

SEQ ID NO: 40673 - DNA, 20 bp, Bacillus megaterium
ggagatgattgaaagatggt

SEQ ID NO: 40674 - DNA, 20 bp, Anaerobiospirillum succiniciproducens
gcgtacagagggaaacgata

SEQ ID NO: 40675 - DNA, 20 bp, Acinetobacter genospecies 3
cctaactgcaaagagggcgg

SEQ ID NO: 40676 - DNA, 20 bp, Prevotella denticola
taaaggcagttcatatccgg

SEQ ID NO: 40677 - DNA, 20 bp, Actinomyces naeslundii
gtctgtcgcatggtgggcct

SEQ ID NO: 40678 - DNA, 20 bp, Clostridium botulinum
gcgatgaagcttcttcggaa

SEQ ID NO: 40679 - DNA, 20 bp, Actinomyces odontolyticus
gaaaggtttgttctggtggg

SEQ ID NO: 40680 - DNA, 20 bp, Prevotella melaninogenica
gtttgcaggtaccatacgaa

SEQ ID NO: 40681 - DNA, 20 bp, Haemophilus segnis
actaggtgattgacgttaac

SEQ ID NO: 40682 - DNA, 20 bp, Brochothrix campestris
cggctgtcactgtgagatgg

SEQ ID NO: 40683 - DNA, 20 bp, Tetragenococcus halophilus
aaagctctgttgtcagcaaa

SEQ ID NO: 40684 - DNA, 20 bp, Tetragenococcus halophilus
gcggcaacccttaggggagc

SEQ ID NO: 40685 - DNA, 20 bp, Tetragenococcus halophilus
aacacgtggggaacctatcc

SEQ ID NO: 40686 - DNA, 20 bp, Bacteroides fragilis
catgtcagtgagcaatcacc

SEQ ID NO: 40687 - DNA, 20 bp, Prevotella intermedia
tctggcttgaaagaccgcct

SEQ ID NO: 40688 - DNA, 20 bp, Burkholderia gladioli
cctggagagatctgggagtg

SEQ ID NO: 40689 - DNA, 20 bp, Suttonella indologenes
cagaggaaggcggaatttcc

SEQ ID NO: 40690 - DNA, 20 bp, Actinomyces naeslundii
tattctgggtctgtcgcatg

SEQ ID NO: 40691 - DNA, 20 bp, Campylobacter concisus
tacggtttccctttgtggtt

SEQ ID NO: 40692 - DNA, 20 bp, Prevotella melaninogenica
tgattgtttgcaggtaccat

SEQ ID NO: 40693 - DNA, 20 bp, Moraxella  catarrhalis
aagtcgaacgaagttaggaa

SEQ ID NO: 40694 - DNA, 20 bp, Gemella bergeri
aggtcattggaaactgataa

SEQ ID NO: 40695 - DNA, 20 bp, Gemella morbillorum
cagccaacctcataaaacta

SEQ ID NO: 40696 - DNA, 20 bp, Facklamia hominis
taataccgcatagaatcgca

SEQ ID NO: 40697 - DNA, 20 bp, Peptoniphilus indolicus
acttactggtcacaaactga

SEQ ID NO: 40698 - DNA, 20 bp, Streptococcus dysgalactiae
ccggttcaaggagttgcgaa

SEQ ID NO: 40699 - DNA, 20 bp, Microbacterium hominis
ctgcgatcgcatggtcagta

SEQ ID NO: 40700 - DNA, 20 bp, Vibrio cholerae
gggcatatccggtagcgcaa

SEQ ID NO: 40701 - DNA, 20 bp, Prevotella disiens
atgctgggcactctgaggat

SEQ ID NO: 40702 - DNA, 20 bp, Staphylococcus sciuri
aatccgcgaggccaagcaaa

SEQ ID NO: 40703 - DNA, 20 bp, Prevotella melaninogenica
aaaggcagactaataccgca

SEQ ID NO: 40704 - DNA, 20 bp, Gemella haemolysans
ataccggataacagcattaa

SEQ ID NO: 40705 - DNA, 20 bp, Prevotella oris
ctggtccacttgagtgtgcg

SEQ ID NO: 40706 - DNA, 20 bp, Lactococcus lactis
tggtagagaagaacgttggt

SEQ ID NO: 40707 - DNA, 20 bp, Alcaligenes faecalis
ctggaaagccgaagagattt

SEQ ID NO: 40708 - DNA, 20 bp, Helcococcus ovis
tcgcatgataattaagttaa

SEQ ID NO: 40709 - DNA, 20 bp, Geobacillus thermoglucosidasius
gacagggcgttcctcccttg

SEQ ID NO: 40710 - DNA, 20 bp, Bacteroides merdae
gctaatctccaaaccatgtc

SEQ ID NO: 40711 - DNA, 20 bp, Bacillus alcalophilus
ggctccggctatcactacgg

SEQ ID NO: 40712 - DNA, 20 bp, Burkholderia multivorans
tggctctaatacagtcgggg

SEQ ID NO: 40713 - DNA, 20 bp, Lactococcus lactis
cagcgaacgggtgagtaacg

SEQ ID NO: 40714 - DNA, 20 bp, Prevotella denticola
gagcgtaggctggagattaa

SEQ ID NO: 40715 - DNA, 20 bp, Prevotella bivia
gtaggccgtttggtaagcgt

SEQ ID NO: 40716 - DNA, 20 bp, Listeria innocua
cgctcttgaaagatggtttc

SEQ ID NO: 40717 - DNA, 20 bp, Propionibacterium freudenreichii
acatgtactggaagcgttca

SEQ ID NO: 40718 - DNA, 20 bp, Oligella ureolytica
cgaagaaaagtcttaggcta

SEQ ID NO: 40719 - DNA, 20 bp, Enterobacter cloacae
gcgacagggttaataaccct

SEQ ID NO: 40720 - DNA, 20 bp, Actinomyces neuii
gaaaaggcagggttttggcc

SEQ ID NO: 40721 - DNA, 20 bp, Bacillus fusiformis
cttgctccttcgacgttagc

SEQ ID NO: 40722 - DNA, 20 bp, Burkholderia cepacia
tggctctaatacagccgggg

SEQ ID NO: 40723 - DNA, 20 bp, Actinomyces neuii
tgagcgaatctcttaaaggg

SEQ ID NO: 40724 - DNA, 20 bp, Gemella haemolysans
cattaactgcatggttgatg

SEQ ID NO: 40725 - DNA, 20 bp, Gemella haemolysans
ggtctcataagagatcagtg

SEQ ID NO: 40726 - DNA, 20 bp, Clostridium butyricum
tcggtacaatgagatgcaac

SEQ ID NO: 40727 - DNA, 20 bp, Clostridium glycolicum
tggtttcttaagtcaggagt

SEQ ID NO: 40728 - DNA, 20 bp, Atopobium parvulum
ttaggtcgggagttaaatcc

SEQ ID NO: 40729 - DNA, 20 bp, Prevotella oris
gcgaactggtccacttgagt

SEQ ID NO: 40730 - DNA, 20 bp, Proteus mirabilis
cccttatcaattgacgttac

SEQ ID NO: 40731 - DNA, 20 bp, Bacteroides merdae
ttatcactagttactaacag

SEQ ID NO: 40732 - DNA, 20 bp, Pasteurella trehalosi
gaggaaggtgttttgtttaa

SEQ ID NO: 40733 - DNA, 20 bp, Streptococcus gallolyticus
gacttgaaagatgcaattgc

SEQ ID NO: 40734 - DNA, 20 bp, Veillonella atypica
gctatcactgaaggagggga

SEQ ID NO: 40735 - DNA, 20 bp, Comamonas terrigena
cctgggttaataccctgggg

SEQ ID NO: 40736 - DNA, 20 bp, Helcococcus kunzii
tttcggtgaaagatggtctc

SEQ ID NO: 40737 - DNA, 20 bp, Chromobacterium violaceum
aagtgggtaggctaaccgca

SEQ ID NO: 40738 - DNA, 20 bp, Anaerococcus tetradius
gcgactttctggtcatcatc

SEQ ID NO: 40739 - DNA, 20 bp, Bacteroides distasonis
gaagtccgtaaccgaaagga

SEQ ID NO: 40740 - DNA, 20 bp, Neisseria meningitidis
tttctctctcaagacgtatg

SEQ ID NO: 40741 - DNA, 20 bp, Serratia proteamaculans
acattgcattgacgttactc

SEQ ID NO: 40742 - DNA, 20 bp, Listeria innocua
gggctaataccgaatgatag

SEQ ID NO: 40743 - DNA, 20 bp, Neisseria meningitidis
ccgcatacgtcttgagagag

SEQ ID NO: 40744 - DNA, 20 bp, Dermabacter hominis
gcccgcatgggttttggtgg

SEQ ID NO: 40745 - DNA, 20 bp, Campylobacter curvus
tactagttgttgctaagcta

SEQ ID NO: 40746 - DNA, 20 bp, Streptococcus thermophilus
cgagcggatgagttgcgaac

SEQ ID NO: 40747 - DNA, 20 bp, Facklamia ignava
ttataggtttgacggtaact

SEQ ID NO: 40748 - DNA, 20 bp, Bacillus cereus
gcccgacctgagagggtgat

SEQ ID NO: 40749 - DNA, 20 bp, Prevotella melaninogenica
aggggaaacggcattgagtg

SEQ ID NO: 40750 - DNA, 20 bp, Anaerococcus tetradius
gcgatctgaagcgaaactca

SEQ ID NO: 40751 - DNA, 20 bp, Alcaligenes faecalis
agccgaagagatttggccgt

SEQ ID NO: 40752 - DNA, 20 bp, Clostridium butyricum
cgagagtgagcaaaactata

SEQ ID NO: 40753 - DNA, 20 bp, Campylobacter gracilis
gacatcctctgacccctcta

SEQ ID NO: 40754 - DNA, 20 bp, Helcococcus ovis
gatactggattacttgagta

SEQ ID NO: 40755 - DNA, 20 bp, Bacteroides thetaiotaomicron
tagccgtaaggcaaatgtga

SEQ ID NO: 40756 - DNA, 20 bp, Brochothrix campestris
atcataagatgttcaagtga

SEQ ID NO: 40757 - DNA, 20 bp, Bacteroides thetaiotaomicron
cgcatggtcttgttattaaa

SEQ ID NO: 40758 - DNA, 20 bp, Nocardia asteroides
ctggccttgacatactaaga

SEQ ID NO: 40759 - DNA, 20 bp, Atopobium parvulum
cggcctaaccttttaggagg

SEQ ID NO: 40760 - DNA, 20 bp, Stenotrophomonas maltophilia
gtaggtggtcgtttaagtct

SEQ ID NO: 40761 - DNA, 20 bp, Helcococcus kunzii
agttgatttcttcggaatga

SEQ ID NO: 40762 - DNA, 20 bp, Peptoniphilus indolicus
agtagtgaagaggtaagtgg

SEQ ID NO: 40763 - DNA, 20 bp, Unknown Organism
  oligonucleotide from CDC group EF-4B
acactttgagaaggaaagca

SEQ ID NO: 40764 - DNA, 20 bp, Anaerococcus tetradius
aacccctatatttagttacc

SEQ ID NO: 40765 - DNA, 20 bp, Fusobacterium varium
ttggttatgaaagctatatg

SEQ ID NO: 40766 - DNA, 20 bp, Prevotella intermedia
gcccgctgttagcgcctggc

SEQ ID NO: 40767 - DNA, 20 bp, Fusobacterium nucleatum
acaatggaccgagagtctga

SEQ ID NO: 40768 - DNA, 20 bp, Streptococcus constellatus
taccccgtattctgtgagtt

SEQ ID NO: 40769 - DNA, 20 bp, Tissierella praeacuta
ctttaattatcttagcggcg

SEQ ID NO: 40770 - DNA, 20 bp, Bacteroides thetaiotaomicron
aattgcatttgaatattttg

SEQ ID NO: 40771 - DNA, 20 bp, Kytococcus sedentarius
accctggacgtgcagtgggt

SEQ ID NO: 40772 - DNA, 20 bp, Haemophilus segnis
gactgggtagctagagtact

SEQ ID NO: 40773 - DNA, 20 bp, Brevibacillus laterosporus
tgctaatctcttaaaaccaa

SEQ ID NO: 40774 - DNA, 20 bp, Helcococcus kunzii
gcgaaggcgactttctagaa

SEQ ID NO: 40775 - DNA, 20 bp, Helcococcus ovis
aatacccgaagccgtcgagc

SEQ ID NO: 40776 - DNA, 20 bp, Bacillus lentus
atctctccaggcggaaagat

SEQ ID NO: 40777 - DNA, 20 bp, Streptococcus constellatus
tttactgcatggtagatgtt

SEQ ID NO: 40778 - DNA, 20 bp, Gemella sanguinis
taactatatacagtagagac

SEQ ID NO: 40779 - DNA, 20 bp, Chryseobacterium meningosepticum
cctacttacgtgtaagtagc

SEQ ID NO: 40780 - DNA, 20 bp, Streptococcus urinalis
aaggagcaactgcttcacta

SEQ ID NO: 40781 - DNA, 20 bp, Weissella paramesenteroides
tcttaaagtatgtctcagtt

SEQ ID NO: 40782 - DNA, 20 bp, Granulicatella elegans
tgctaaaaccgcataggttc

SEQ ID NO: 40783 - DNA, 20 bp, Streptococcus anginosus
gttagaaaagtctgaagtga

SEQ ID NO: 40784 - DNA, 20 bp, Acinetobacter radioresistens
tagattaatactttaggata

SEQ ID NO: 40785 - DNA, 20 bp, Leptotrichia buccalis
agccaatctttaaagccggt

SEQ ID NO: 40786 - DNA, 20 bp, Streptococcus vestibularis
gtgacacatgtcatttattt

SEQ ID NO: 40787 - DNA, 20 bp, Photobacterium damselae
cacctgcattatttgacgtt

SEQ ID NO: 40788 - DNA, 20 bp, Eggerthella lenta
gaactgggaggctcgagttc

SEQ ID NO: 40789 - DNA, 20 bp, Gemella haemolysans
ttaaaagttggttttgctaa

SEQ ID NO: 40790 - DNA, 20 bp, Peptoniphilus indolicus
cacatgtcataacgatcaaa

SEQ ID NO: 40791 - DNA, 20 bp, Comamonas testosteroni
actagagcggctgatggcag

SEQ ID NO: 40792 - DNA, 20 bp, Anaerococcus prevotii
agcctcaatacaggtggtgc

SEQ ID NO: 40793 - DNA, 20 bp, Acinetobacter radioresistens
ggctacctagattaatactt

SEQ ID NO: 40794 - DNA, 20 bp, Bacillus simplex
atgagagaagatggaaagac

SEQ ID NO: 40795 - DNA, 20 bp, Staphylococcus aureus
cgaacggacgagaagcttgc

SEQ ID NO: 40796 - DNA, 20 bp, Listeria innocua
gccacgctcttgaaagatgg

SEQ ID NO: 40797 - DNA, 20 bp, Cardiobacterium hominis
ccttacttgccagcactttg

SEQ ID NO: 40798 - DNA, 20 bp, Prevotella disiens
gaaatgtagatgctcaacat

SEQ ID NO: 40799 - DNA, 20 bp, Helcococcus kunzii
tttcggagacttgtatacag

SEQ ID NO: 40800 - DNA, 20 bp, Anaerococcus prevotii
agtgctaggtatcggaataa

SEQ ID NO: 40801 - DNA, 20 bp, Acinetobacter genospecies 3
cgagcggagagaggtagctt

SEQ ID NO: 40802 - DNA, 20 bp, Anaerococcus prevotii
gatgaaatcttgacagaacc

SEQ ID NO: 40803 - DNA, 20 bp, Bacteroides thetaiotaomicron
tgggaataaagttttccacg

SEQ ID NO: 40804 - DNA, 20 bp, Bacteroides fragilis
cagctagcgggtgaccgtat

SEQ ID NO: 40805 - DNA, 20 bp, Acinetobacter lwoffii
agcgcgcgtaggtggccaat

SEQ ID NO: 40806 - DNA, 20 bp, Bacillus azotoformans
taaaggagcttgctccttta

SEQ ID NO: 40807 - DNA, 20 bp, Tetragenococcus halophilus
ggaaatgctttttctatgac

SEQ ID NO: 40808 - DNA, 20 bp, Bacillus megaterium
taggatcttctccttcatgg

SEQ ID NO: 40809 - DNA, 20 bp, Tetragenococcus halophilus
tacaacgagcaagccaagcc

SEQ ID NO: 40810 - DNA, 20 bp, Streptococcus constellatus
aaggaagaacgtgtgtgaga

SEQ ID NO: 40811 - DNA, 20 bp, Bordetella bronchiseptica
gctaatatcctgtgcaactg

SEQ ID NO: 40812 - DNA, 20 bp, Bacteroides uniformis
gggactctgtcgagactgcc

SEQ ID NO: 40813 - DNA, 20 bp, Streptococcus thermophilus
ttgcaccgagcggatgagtt

SEQ ID NO: 40814 - DNA, 20 bp, Bacillus lentus
gaaagataatctatccggta

SEQ ID NO: 40815 - DNA, 20 bp, Chromobacterium violaceum
ggtaacagggtgcttgcacc

SEQ ID NO: 40816 - DNA, 20 bp, Moraxella osloensis
gtgatactggtggtgctaga

SEQ ID NO: 40817 - DNA, 20 bp, Chromobacterium violaceum
accgtgtaatgggggatagc

SEQ ID NO: 40818 - DNA, 20 bp, Leptotrichia buccalis
tgaagagtgtccgtgccgaa

SEQ ID NO: 40819 - DNA, 20 bp, Peptostreptococcus anaerobius
taatgacggtaccctgtgag

SEQ ID NO: 40820 - DNA, 20 bp, Arcanobacterium bernardiae
gttgcgcctgctgtgaaaga

SEQ ID NO: 40821 - DNA, 20 bp, Bacillus badius
aagaacaagtacggaagtaa

SEQ ID NO: 40822 - DNA, 20 bp, Actinomyces bovis
gccggtggcctaacctagtt

SEQ ID NO: 40823 - DNA, 20 bp, Bacteroides uniformis
gaattgcaactgaatgatgt

SEQ ID NO: 40824 - DNA, 20 bp, Actinomyces bovis
cacagagatgtgtaatagtt

SEQ ID NO: 40825 - DNA, 20 bp, Clostridium botulinum
gtacaataagacgcaagacc

SEQ ID NO: 40826 - DNA, 20 bp, Geobacillus thermoglucosidasius
gtcgagcggaccgggcggga

SEQ ID NO: 40827 - DNA, 20 bp, Prevotella intermedia
gcacattctggacgtcgacc

SEQ ID NO: 40828 - DNA, 20 bp, Burkholderia gladioli
taatatccttcggggatgac

SEQ ID NO: 40829 - DNA, 20 bp, Alicyclobacillus acidocaldarius
tcctctctcagcggcccaat

SEQ ID NO: 40830 - DNA, 20 bp, Bacteroides merdae
aggatctatggtttgtaaac

SEQ ID NO: 40831 - DNA, 20 bp, Corynebacterium xerosis
taaactcctttcaccatcga

SEQ ID NO: 40832 - DNA, 20 bp, Leptotrichia buccalis
aatgccgatgatgaagatag

SEQ ID NO: 40833 - DNA, 20 bp, Haemophilus haemolyticus
accgcgtagtgtcgagagac

SEQ ID NO: 40834 - DNA, 20 bp, Corynebacterium afermentans
acctgtatagagaccttgcg

SEQ ID NO: 40835 - DNA, 20 bp, Shewanella algae
tgtaagttaataccttacat

SEQ ID NO: 40836 - DNA, 20 bp, Pediococcus inopinatus
ataaagtgagtggcgaacgg

SEQ ID NO: 40837 - DNA, 20 bp, Peptostreptococcus anaerobius
gggagtcggaaacacccgaa

SEQ ID NO: 40838 - DNA, 20 bp, Arthrobacter globiformis
catggaccggaccgccgcag

SEQ ID NO: 40839 - DNA, 20 bp, Leptotrichia buccalis
tgtgagaacaggcagtgcct

SEQ ID NO: 40840 - DNA, 20 bp, Moraxella lacunata
aagcttgtggttaataccta

SEQ ID NO: 40841 - DNA, 20 bp, Pediococcus acidilactici
gaagaacgtgggtgagagta

SEQ ID NO: 40842 - DNA, 20 bp, Actinomyces neuii
cgttgggtacgggcaggctt

SEQ ID NO: 40843 - DNA, 20 bp, Geobacillus thermoglucosidasius
agtcgagcggaccgggcggg

SEQ ID NO: 40844 - DNA, 20 bp, Actinomyces bovis
gatgccatagaaactggtag

SEQ ID NO: 40845 - DNA, 20 bp, Eschericchia vulneris
gtacacggtccagtactcct

SEQ ID NO: 40846 - DNA, 20 bp, Paenibacillus azotofixans
agttaacacagtaagcactc

SEQ ID NO: 40847 - DNA, 20 bp, Prevotella loescheii
cgatgatacgcgaggaacct

SEQ ID NO: 40848 - DNA, 20 bp, Chromobacterium violaceum
gcgtcggaatgtaccgtgta

SEQ ID NO: 40849 - DNA, 20 bp, Bacillus alcalophilus
taccggataatcaaaggaat

SEQ ID NO: 40850 - DNA, 20 bp, Anaerococcus tetradius
agtgttaggtgtctggaata

SEQ ID NO: 40851 - DNA, 20 bp, Weeksella virosa
gacggggactctaatgagac

SEQ ID NO: 40852 - DNA, 20 bp, Facklamia ignava
ataccgcatagttgttccag

SEQ ID NO: 40853 - DNA, 20 bp, Yersinia ruckeri
aatagcactgaacattgacg

SEQ ID NO: 40854 - DNA, 20 bp, Corynebacterium glucuronolyticum
ctgggtctaataccctatag

SEQ ID NO: 40855 - DNA, 20 bp, Neisseria meningitidis
cgagtcacccagttcagaac

SEQ ID NO: 40856 - DNA, 20 bp, Sporosarcina pasteurii
cgccccttagtgctggagca

SEQ ID NO: 40857 - DNA, 20 bp, Weissella paramesenteroides
ctctgatttgattttatctg

SEQ ID NO: 40858 - DNA, 20 bp, Actinomyces odontolyticus
agttggtcgtgtgcaggtgg

SEQ ID NO: 40859 - DNA, 20 bp, Dolosigranulum pigrum
ggaacggcattggaaactga

SEQ ID NO: 40860 - DNA, 20 bp, Corynebacterium xerosis
ccggataggaccgcaccgtg

SEQ ID NO: 40861 - DNA, 20 bp, Staphylococcus muscae
aacagacgaggtgcttgcac

SEQ ID NO: 40862 - DNA, 20 bp, Gemella sanguinis
tcatagacggggacaactat

SEQ ID NO: 40863 - DNA, 20 bp, Proteus mirabilis
ggaccttgcactatcggatg

SEQ ID NO: 40864 - DNA, 20 bp, Eggerthella lenta
cgaactgggaggctcgagtt

SEQ ID NO: 40865 - DNA, 20 bp, Prevotella bivia
ctgctgggcactctggagat

SEQ ID NO: 40866 - DNA, 20 bp, Haemophilus paraphrophilus
agcgcaacaaattgacgtta

SEQ ID NO: 40867 - DNA, 20 bp, Actinomyces meyeri
tgcggagacgtgcgtgcatt

SEQ ID NO: 40868 - DNA, 20 bp, Corynebacterium glucuronolyticum
accctataggaccgcatcgt

SEQ ID NO: 40869 - DNA, 20 bp, Ignavigranum ruoffiae
accagcattgagatggggac

SEQ ID NO: 40870 - DNA, 20 bp, Campylobacter sputorum
gcttgctaggatggattagt

SEQ ID NO: 40871 - DNA, 20 bp, Peptoniphilus indolicus
ttcccttcggggacagtatt

SEQ ID NO: 40872 - DNA, 20 bp, Enterobacter cloacae
gacagggttaataaccctgt

SEQ ID NO: 40873 - DNA, 20 bp, Streptococcus macacae
ggagagagtggaaagttctc

SEQ ID NO: 40874 - DNA, 20 bp, Alcaligenes faecalis
aagaaaaggtacctcctaat

SEQ ID NO: 40875 - DNA, 20 bp, Neisseria subflava
gaaaaggctgttgctaacat

SEQ ID NO: 40876 - DNA, 20 bp, Tetragenococcus halophilus
gtaaagctctgttgtcagca

SEQ ID NO: 40877 - DNA, 20 bp, Arthrobacter globiformis
tgacatggaccggaccgccg

SEQ ID NO: 40878 - DNA, 20 bp, Acinetobacter junii
accttatcttagcggcggac

SEQ ID NO: 40879 - DNA, 20 bp, Kocuria kristinae
gtggaaagggttatgtactg

SEQ ID NO: 40880 - DNA, 20 bp, Anaerobiospirillum succiniciproducens
ccttcgggaacctacagaca

SEQ ID NO: 40881 - DNA, 20 bp, Alcaligenes faecalis
ctgctgacggtatctgcaga

SEQ ID NO: 40882 - DNA, 20 bp, Propionibacterium freudenreichii
gtgcccttgacttcggtata

SEQ ID NO: 40883 - DNA, 20 bp, Streptococcus thermophilus
aacaatggatgacacatgtc

SEQ ID NO: 40884 - DNA, 20 bp, Leuconostoc carnosum
aggttaaaaggcgctacggc

SEQ ID NO: 40885 - DNA, 20 bp, Dermabacter hominis
ggcccgcatgggttttggtg

SEQ ID NO: 40886 - DNA, 20 bp, Corynebacterium seminale
ctccagcttgctggggtgct

SEQ ID NO: 40887 - DNA, 20 bp, Tetragenococcus halophilus
tgcttaagaagaaacttcgg

SEQ ID NO: 40888 - DNA, 20 bp, Aerococcus viridans
tatagatgaccttgcggtgc

SEQ ID NO: 40889 - DNA, 20 bp, Prevotella melaninogenica
gaaaggcagactaataccgc

SEQ ID NO: 40890 - DNA, 20 bp, Bacteroides fragilis
gcagctagcgggtgaccgta

SEQ ID NO: 40891 - DNA, 20 bp, Geobacillus thermoglucosidasius
gcggaccgggcgggagcttg

SEQ ID NO: 40892 - DNA, 20 bp, Clostridium botulinum
tcttatcaaagatttattgc

SEQ ID NO: 40893 - DNA, 20 bp, Paenibacillus thiaminolyticus
acgctatggagagtaactgt

SEQ ID NO: 40894 - DNA, 20 bp, Fusobacterium mortiferum
gggtgatggtggcggacggg

SEQ ID NO: 40895 - DNA, 20 bp, Paenibacillus larvae
taagaccgggataacttgcg

SEQ ID NO: 40896 - DNA, 20 bp, Weeksella virosa
gctaccaggtgactggatgc

SEQ ID NO: 40897 - DNA, 20 bp, Campylobacter rectus
tcatccagagatggaagagt

SEQ ID NO: 40898 - DNA, 20 bp, Streptococcus criceti
gagttacttcggtacatcgg

SEQ ID NO: 40899 - DNA, 20 bp, Streptococcus constellatus
tactacaccgtattctgtga

SEQ ID NO: 40900 - DNA, 20 bp, Gemella haemolysans
aactatacacagtagagacg

SEQ ID NO: 40901 - DNA, 20 bp, Bacteroides merdae
tttgcgatacaatgtaagct

SEQ ID NO: 40902 - DNA, 20 bp, Weeksella virosa
actgccattgatactgttga

SEQ ID NO: 40903 - DNA, 20 bp, Propionibacterium freudenreichii
gcttgtaggcggttgatcac

SEQ ID NO: 40904 - DNA, 20 bp, Sporosarcina ureae
tggacgatacagagggctgc

SEQ ID NO: 40905 - DNA, 20 bp, Tissierella praeacuta
ggtaagcatttgaaactgaa

SEQ ID NO: 40906 - DNA, 20 bp, Actinomyces bovis
ggtcttgacataccgcgcaa

SEQ ID NO: 40907 - DNA, 20 bp, Abiotrophia defectiva
ttatgcgtgtgacggtatct

SEQ ID NO: 40908 - DNA, 20 bp, Fusobacterium mortiferum
ctttcagttgggacgaagta

SEQ ID NO: 40909 - DNA, 20 bp, Empedobacter brevis
agctgaaggtaccagaagaa

SEQ ID NO: 40910 - DNA, 20 bp, Peptostreptococcus anaerobius
ttagaccggtgtttaatcac

SEQ ID NO: 40911 - DNA, 20 bp, Bacteroides forsythus
actggtagtcttgagtatag

SEQ ID NO: 40912 - DNA, 20 bp, Finegoldia magna
catagatgggctcgcgtctg

SEQ ID NO: 40913 - DNA, 20 bp, Lactococcus lactis
gttggtgagagtggaaagct

SEQ ID NO: 40914 - DNA, 20 bp, Arcanobacterium bernardiae
ttcggggttgcagtgggtac

SEQ ID NO: 40915 - DNA, 20 bp, Veillonella atypica
gatggaaactgctgatctag

SEQ ID NO: 40916 - DNA, 20 bp, Bacteroides thetaiotaomicron
taggtggacagttaagtcag

SEQ ID NO: 40917 - DNA, 20 bp, Lactococcus garvieae
tagagataaggagttccttc

SEQ ID NO: 40918 - DNA, 20 bp, Gemella morbillorum
ctttaaggagggagccggtc

SEQ ID NO: 40919 - DNA, 20 bp, Morganella morganii
tctgatactggtcagctaga

SEQ ID NO: 40920 - DNA, 20 bp, Finegoldia magna
gaaactgataaacttgagta

SEQ ID NO: 40921 - DNA, 20 bp, Streptococcus dysgalactiae
acgctgaggactggtgcttg

SEQ ID NO: 40922 - DNA, 20 bp, Vibrio cholerae
gtttcaaatgcgattcctag

SEQ ID NO: 40923 - DNA, 20 bp, Pasteurella aerogenes
ggaaggcggttagtttaata

SEQ ID NO: 40924 - DNA, 20 bp, Bacteroides fragilis
tgctaatcccaaaatcctct

SEQ ID NO: 40925 - DNA, 20 bp, Lactococcus lactis
tacatgcaagttgagcgatg

SEQ ID NO: 40926 - DNA, 20 bp, Bacillus lentus
ctggcaactagaaccaaggg

SEQ ID NO: 40927 - DNA, 20 bp, Aerococcus viridans
attctggtctgttactgaca

SEQ ID NO: 40928 - DNA, 20 bp, Prevotella loescheii
ggtgaaaccggtgattgggg

SEQ ID NO: 40929 - DNA, 20 bp, Facklamia ignava
ttgcattggaaactggtcaa

SEQ ID NO: 40930 - DNA, 20 bp, Brevibacillus choshinensis
accggatacttctttcagac

SEQ ID NO: 40931 - DNA, 20 bp, Oligella urethralis
tttcttcgttgagaaaagtg

SEQ ID NO: 40932 - DNA, 19 bp, Corynebacterium macginleyi
acccgtaccggaaggtgcg

SEQ ID NO: 40933 - DNA, 20 bp, Bacteroides fragilis
tttctttgctggcgaccggc

SEQ ID NO: 40934 - DNA, 20 bp, Campylobacter curvus
tgctaagctagtcttggcag

SEQ ID NO: 40935 - DNA, 20 bp, Streptococcus dysgalactiae
tcatttaaaaggtgcaactg

SEQ ID NO: 40936 - DNA, 20 bp, Actinomyces bovis
gggaagaacgataggaagag

SEQ ID NO: 40937 - DNA, 20 bp, Moraxella lacunata
agagaaagggggcttttagc

SEQ ID NO: 40938 - DNA, 20 bp, Bacteroides ureolyticus
atagctaccttccacagtgg

SEQ ID NO: 40939 - DNA, 20 bp, Propionibacterium propionicus
cgtctagagataggcgcccc

SEQ ID NO: 40940 - DNA, 20 bp, Actinomyces bovis
gtgtaatagttatggcggat

SEQ ID NO: 40941 - DNA, 20 bp, Paenibacillus amylolyticus
caaggctcaaccttggttcg

SEQ ID NO: 40942 - DNA, 20 bp, Haemophilus actinemycetemcomitans
gtaggcggacctttaagtga

SEQ ID NO: 40943 - DNA, 20 bp, Suttonella indologenes
agagattggaaggaacaccg

SEQ ID NO: 40944 - DNA, 20 bp, Staphylococcus pulvereri
atcctttgatcgctctagag

SEQ ID NO: 40945 - DNA, 20 bp, Bacillus flexus
gaactgattagaagcttgct

SEQ ID NO: 40946 - DNA, 20 bp, Peptostreptococcus anaerobius
ggtggtctttcaagtcggtg

SEQ ID NO: 40947 - DNA, 20 bp, Photobacterium damselae
ggtagtgtagttaacacctg

SEQ ID NO: 40948 - DNA, 20 bp, Pseudoramibacter alactolyticus
gggaagaaaacatgacggta

SEQ ID NO: 40949 - DNA, 20 bp, Kocuria rosea
gtggtggaaagggttttact

SEQ ID NO: 40950 - DNA, 20 bp, Anaerococcus prevotii
aataattcggtgccgcagtt

SEQ ID NO: 40951 - DNA, 20 bp, Brevibacillus agri
cagggacgaacacgtaccgt

SEQ ID NO: 40952 - DNA, 20 bp, Acinetobacter haemolyticus
gcttgctacattacctagcg

SEQ ID NO: 40953 - DNA, 20 bp, Bacillus coagulans
tgttaaaagacggtttcggc

SEQ ID NO: 40954 - DNA, 20 bp, Alicyclobacillus acidocaldarius
atgcctcctcgcgggcgtat

SEQ ID NO: 40955 - DNA, 20 bp, Corynebacterium glucuronolyticum
ggcaggcgatacgggcattg

SEQ ID NO: 40956 - DNA, 20 bp, Vibrio hollisae
catgggagtggaatccgcca

SEQ ID NO: 40957 - DNA, 20 bp, Cardiobacterium hominis
gactagagtatgaaagagga

SEQ ID NO: 40958 - DNA, 20 bp, Bacteroides caccae
tttatatgggaataaagttg

SEQ ID NO: 40959 - DNA, 20 bp, Bacteroides thetaiotaomicron
gcttaaattgcatttgaata

SEQ ID NO: 40960 - DNA, 20 bp, Moraxella lacunata
tacctacaagccctgacgtt

SEQ ID NO: 40961 - DNA, 20 bp, Aerococcus viridans
tatcttcttccgcatggaag

SEQ ID NO: 40962 - DNA, 20 bp, Fusobacterium mortiferum
gccctgcagtctgggacaac

SEQ ID NO: 40963 - DNA, 20 bp, Peptostreptococcus anaerobius
aaagttctgttgcaggggaa

SEQ ID NO: 40964 - DNA, 20 bp, Tetragenococcus halophilus
gatggctggtcccgcggtgc

SEQ ID NO: 40965 - DNA, 20 bp, Peptostreptococcus anaerobius
tcaagtcggtggttaaaggc

SEQ ID NO: 40966 - DNA, 20 bp, Corynebacterium coyleae
taccggataggaccacttct

SEQ ID NO: 40967 - DNA, 20 bp, Actinomyces bovis
gatgtgtaatagttatggcg

SEQ ID NO: 40968 - DNA, 20 bp, Rothia mucilaginosa
ggaccgcatcagagatggtg

SEQ ID NO: 40969 - DNA, 20 bp, Acinetobacter radioresistens
attaatactttaggatagtg

SEQ ID NO: 40970 - DNA, 20 bp, Moraxella atlantae
aggctcaccatggcgacgat

SEQ ID NO: 40971 - DNA, 20 bp, Alicyclobacillus acidocaldarius
cttcccccgcaagaagatgc

SEQ ID NO: 40972 - DNA, 20 bp, Bacteroides fragilis
atactgttttgtatgtatta

SEQ ID NO: 40973 - DNA, 20 bp, Pseudomonas citronellolis
tgtccggaattctgcagaga

SEQ ID NO: 40974 - DNA, 20 bp, Streptococcus thoraltensis
ttaaaaggtgcaacagcatc

SEQ ID NO: 40975 - DNA, 20 bp, Bacillus pumilus
ccttgaaccgcatggttcaa

SEQ ID NO: 40976 - DNA, 20 bp, Burkholderia gladioli
ccttcggggatgacggtacc

SEQ ID NO: 40977 - DNA, 20 bp, Leptotrichia buccalis
cacctgaagccgccggtcca

SEQ ID NO: 40978 - DNA, 20 bp, Bacillus circulans
tgaggaaaagctgaaagacg

SEQ ID NO: 40979 - DNA, 20 bp, Clostridium clostridiiforme
cggttaagcaagtctgaagt

SEQ ID NO: 40980 - DNA, 20 bp, Listeria monocytogenes
cttttgaaagatggtttcgg

SEQ ID NO: 40981 - DNA, 20 bp, Alicyclobacillus acidocaldarius
tagccgggggcttcctcact

SEQ ID NO: 40982 - DNA, 20 bp, Rhodococcus equi
gtttctggggggagtggtcg

SEQ ID NO: 40983 - DNA, 20 bp, Streptococcus parauberis
agaacgctgaagactggtgc

SEQ ID NO: 40984 - DNA, 20 bp, Leptotrichia buccalis
cttgccctgcagacagggat

SEQ ID NO: 40985 - DNA, 20 bp, Paenibacillus popilliae
aagaacgccttgtagagtaa

SEQ ID NO: 40986 - DNA, 20 bp, Propionibacterium freudenreichii
ttgacatgtactggaagcgt

SEQ ID NO: 40987 - DNA, 20 bp, Campylobacter rectus
gcttcgctagtcgaggcagt

SEQ ID NO: 40988 - DNA, 20 bp, Fusobacterium mortiferum
aaagcgcgtctaggcggttt

SEQ ID NO: 40989 - DNA, 20 bp, Porphyromonas endodontalis
cgacggttctatggattgta

SEQ ID NO: 40990 - DNA, 20 bp, Tissierella praeacuta
ctttagttgctaacagataa

SEQ ID NO: 40991 - DNA, 20 bp, Prevotella intermedia
gcattatgtgcttgcacatt

SEQ ID NO: 40992 - DNA, 20 bp, Peptoniphilus indolicus
tagtgaagaggtaagtggaa

SEQ ID NO: 40993 - DNA, 20 bp, Arcanobacterium haemolyticum
gaacaaggcgaaagttgagg

SEQ ID NO: 40994 - DNA, 20 bp, Corynebacterium glucuronolyticum
taataccctataggaccgca

SEQ ID NO: 40995 - DNA, 20 bp, Photobacterium damselae
gagaagcttgaagagattcg

SEQ ID NO: 40996 - DNA, 20 bp, Atopobium parvulum
agtcgattgcacccgaagtc

SEQ ID NO: 40997 - DNA, 20 bp, Campylobacter curvus
ttgttgctgagctagtcttg

SEQ ID NO: 40998 - DNA, 20 bp, Helcococcus kunzii
agctacctcgtgagagcaag

SEQ ID NO: 40999 - DNA, 20 bp, Weeksella virosa
ctatcgcttaacgatagaac

SEQ ID NO: 41000 - DNA, 20 bp, Brochothrix campestris
cacagctggggataacatcg

SEQ ID NO: 41001 - DNA, 20 bp, Clostridium clostridiiforme
tgaagttttcggatggattt

SEQ ID NO: 41002 - DNA, 20 bp, Bacillus cereus
ctctcaagaagttagcggcg

SEQ ID NO: 41003 - DNA, 20 bp, Eikenella corrodens
accttccagagacggaaggg

SEQ ID NO: 41004 - DNA, 20 bp, Microbacterium hominis
tccccttgtggagggagccg

SEQ ID NO: 41005 - DNA, 20 bp, Bacteroides fragilis
taatacccgatggcataatg

SEQ ID NO: 41006 - DNA, 20 bp, Bacteroides stercoris
acgtggtgctaatcccgaaa

SEQ ID NO: 41007 - DNA, 20 bp, Brevibacillus agri
cttttcgctatcactgggag

SEQ ID NO: 41008 - DNA, 20 bp, Streptococcus equinus
gcatttaacacatgttagat

SEQ ID NO: 41009 - DNA, 20 bp, Bacteroides uniformis
atggtagaactattaaagaa

SEQ ID NO: 41010 - DNA, 20 bp, Paenibacillus peoriae
gaagcttgcttctaaacaac

SEQ ID NO: 41011 - DNA, 20 bp, Sporosarcina pasteurii
agtaactgcctgtaccttga

SEQ ID NO: 41012 - DNA, 20 bp, Bacteroides thetaiotaomicron
atatgggaataaagttttcc

SEQ ID NO: 41013 - DNA, 20 bp, Abiotrophia defectiva
gttagagaagaacagcgcat

SEQ ID NO: 41014 - DNA, 20 bp, Turicella otitidis
gtgtgagggtcttttcacga

SEQ ID NO: 41015 - DNA, 20 bp, Gemella haemolysans
gcattaactgcatggttgat

SEQ ID NO: 41016 - DNA, 20 bp, Paenibacillus macerans
agcaatctgtcacttagaga

SEQ ID NO: 41017 - DNA, 20 bp, Paenibacillus amylolyticus
acgtccggtagagtaactgc

SEQ ID NO: 41018 - DNA, 20 bp, Bacillus alcalophilus
ggataatcaaaggaatcaca

SEQ ID NO: 41019 - DNA, 20 bp, Pseudomonas citronellolis
gggagcttgcttctggattc

SEQ ID NO: 41020 - DNA, 20 bp, Collinsella aerofaciens
tggggggacgatccccccgt

SEQ ID NO: 41021 - DNA, 20 bp, Lactococcus lactis
tgagagtggaaagctcatca

SEQ ID NO: 41022 - DNA, 20 bp, Actinomyces bovis
gtgatgccatagaaactggt

SEQ ID NO: 41023 - DNA, 20 bp, Prevotella bivia
ttttgcaggtaccatatgaa

SEQ ID NO: 41024 - DNA, 20 bp, Prevotella loescheii
gacgatgaggcccttcgggg

SEQ ID NO: 41025 - DNA, 20 bp, Haemophilus ducreyi
ttgacatccatagaagaact

SEQ ID NO: 41026 - DNA, 20 bp, Bacteroides fragilis
tctttgctggcgaccggcgc

SEQ ID NO: 41027 - DNA, 20 bp, Bacillus halodurans
ggaggttagcggcgaacggg

SEQ ID NO: 41028 - DNA, 20 bp, Paenibacillus popilliae
gaagaacgccttgtagagta

SEQ ID NO: 41029 - DNA, 20 bp, Corynebacterium glucuronolyticum
cagtgcgtgtgcgacaccgt

SEQ ID NO: 41030 - DNA, 20 bp, Actinomyces bovis
ccgtgcgaaggtaggatcga

SEQ ID NO: 41031 - DNA, 20 bp, Pasteurella trehalosi
tttaatagacaaagcaattg

SEQ ID NO: 41032 - DNA, 20 bp, Campylobacter lari
tgggaaactggtaatctaga

SEQ ID NO: 41033 - DNA, 20 bp, Finegoldia magna
ttgagtagtggagaggaaag

SEQ ID NO: 41034 - DNA, 20 bp, Eggerthella lenta
gccggatcccgaactgggag

SEQ ID NO: 41035 - DNA, 20 bp, Actinomyces odontolyticus
gacatgcacggcggcactgc

SEQ ID NO: 41036 - DNA, 20 bp, Bacillus sp
gcatggagagagattgaaag

SEQ ID NO: 41037 - DNA, 20 bp, Microbacterium hominis
tcgcatggtcagtagctgga

SEQ ID NO: 41038 - DNA, 20 bp, Moraxella osloensis
aactgcatgtgatactggtg

SEQ ID NO: 41039 - DNA, 20 bp, Streptococcus ratti
cggccagtagagtttgatca

SEQ ID NO: 41040 - DNA, 20 bp, Moraxella osloensis
ttagatgagcctaaatcaga

SEQ ID NO: 41041 - DNA, 20 bp, Streptococcus infantarius
ttagcttgctaaagtttgaa

SEQ ID NO: 41042 - DNA, 20 bp, Gemella morbillorum
ctagaaaaacttagcggcga

SEQ ID NO: 41043 - DNA, 20 bp, Bacteroides fragilis
cgtaggtggactggtaagtc

SEQ ID NO: 41044 - DNA, 20 bp, Anaerococcus prevotii
gtggaatttttagtgtagcg

SEQ ID NO: 41045 - DNA, 20 bp, Oligella urethralis
accgtcagcatcttaaggta

SEQ ID NO: 41046 - DNA, 20 bp, Bacteroides ovatus
gaatatattggaaacagtat

SEQ ID NO: 41047 - DNA, 20 bp, Haemophilus ducreyi
aaattgattgacgttagtca

SEQ ID NO: 41048 - DNA, 20 bp, Bacteroides uniformis
gttatgctggggactctgtc

SEQ ID NO: 41049 - DNA, 20 bp, Pasteurella aerogenes
gaaggcggttagtttaatag

SEQ ID NO: 41050 - DNA, 20 bp, Actinomyces bovis
gccgtgcgaaggtaggatcg

SEQ ID NO: 41051 - DNA, 20 bp, Pasteurella trehalosi
gaaggtgttttgtttaatag

SEQ ID NO: 41052 - DNA, 20 bp, Streptococcus constellatus
gacgacgctggcggcgtgcc

SEQ ID NO: 41053 - DNA, 20 bp, Acinetobacter genospecies 3
gcggctaattaagtcaaatg

SEQ ID NO: 41054 - DNA, 20 bp, Corynebacterium group F
ccttgtgaggggatgctaat

SEQ ID NO: 41055 - DNA, 20 bp, Leuconostoc pseudomesenteroides
gtcgcatgacacaaagttaa

SEQ ID NO: 41056 - DNA, 20 bp, Propionibacterium avidum
agatgggtatgcctccttgt

SEQ ID NO: 41057 - DNA, 20 bp, Lactococcus lactis
accacgggagttgggagtac

SEQ ID NO: 41058 - DNA, 20 bp, Facklamia ignava
cagtgctggcgcaaacgcaa

SEQ ID NO: 41059 - DNA, 20 bp, Granulicatella elegans
ggaaaagaggcttcggcttc

SEQ ID NO: 41060 - DNA, 20 bp, Neisseria flavescens
gttgctaatatcgacagctg

SEQ ID NO: 41061 - DNA, 20 bp, Clostridium paraputrificum
catgtaatgtgggaagtccc

SEQ ID NO: 41062 - DNA, 20 bp, Prevotella corporis
cggaagcgggcggaattcgt

SEQ ID NO: 41063 - DNA, 20 bp, Nocardia asteroides
ggtaactgacctagcggcgg

SEQ ID NO: 41064 - DNA, 20 bp, Porphyromonas endodontalis
acccgcgtcgatagttacta

SEQ ID NO: 41065 - DNA, 20 bp, Gemella sanguinis
aacaaagagaagctaactcg

SEQ ID NO: 41066 - DNA, 20 bp, Streptococcus porcinus
taataccgcatgaaagtaga

SEQ ID NO: 41067 - DNA, 20 bp, Corynebacterium jeikeium
tttgcttgcaaggggtactc

SEQ ID NO: 41068 - DNA, 20 bp, Bacillus coagulans
ttcggacctcacgccaccgg

SEQ ID NO: 41069 - DNA, 20 bp, Prevotella oralis
caacttttgatggcgaccgg

SEQ ID NO: 41070 - DNA, 20 bp, Clostridium paraputrificum
catgtaatgtgggaagtcct

SEQ ID NO: 41071 - DNA, 20 bp, Aerococcus viridans
gaaggcgacattctggtctg

SEQ ID NO: 41072 - DNA, 20 bp, Gemella bergeri
gccaatctcataaaactatt

SEQ ID NO: 41073 - DNA, 20 bp, Pediococcus dextrinicus
gtaagctgtcacttttggat

SEQ ID NO: 41074 - DNA, 20 bp, Fusobacterium varium
tttcgtgcctcttcggagga

SEQ ID NO: 41075 - DNA, 20 bp, Leuconostoc citreum
agaaatgctaaaatagggaa

SEQ ID NO: 41076 - DNA, 20 bp, Streptococcus equi
gagcaacagctccactatga

SEQ ID NO: 41077 - DNA, 20 bp, Clostridium clostridiiforme
gtctgaagtgaaaacccagg

SEQ ID NO: 41078 - DNA, 20 bp, Oligella ureolytica
aacgaagaaaagtcttaggc

SEQ ID NO: 41079 - DNA, 20 bp, Enterococcus raffinosus
catggtttctatttgaaagg

SEQ ID NO: 41080 - DNA, 20 bp, Pseudoramibacter alactolyticus
agaaccgcaaggactcagca

SEQ ID NO: 41081 - DNA, 20 bp, Alcaligenes faecalis
gtgtgtaggcggttcggaaa

SEQ ID NO: 41082 - DNA, 20 bp, Sphingobacterium multivorum
gttaccgcaaggagcgtgtt

SEQ ID NO: 41083 - DNA, 20 bp, Corynebacterium amycolatum
actcgtaagaaactgccggg

SEQ ID NO: 41084 - DNA, 20 bp, Moraxella osloensis
atgggagtctattgcaccag

SEQ ID NO: 41085 - DNA, 20 bp, Streptococcus gordonii
cgtagcttgctacaccatag

SEQ ID NO: 41086 - DNA, 20 bp, Streptococcus hyovaginalis
gtttactctgtgacggtagc

SEQ ID NO: 41087 - DNA, 20 bp, Prevotella corporis
cgggcttgaattgcaggaga

SEQ ID NO: 41088 - DNA, 20 bp, Anaerococcus tetradius
aaggcgactttctggccata

SEQ ID NO: 41089 - DNA, 20 bp, Porphyromonas endodontalis
caactgtagtcttgccgttg

SEQ ID NO: 41090 - DNA, 20 bp, Campylobacter sputorum
gacatcctttgacccttcta

SEQ ID NO: 41091 - DNA, 20 bp, Peptoniphilus indolicus
tgacacggggatagccaccg

SEQ ID NO: 41092 - DNA, 20 bp, Streptococcus parasanguinis
cttggtgcttgcaccgagcg

SEQ ID NO: 41093 - DNA, 20 bp, Oligella urethralis
ctcgccatcaagagagcaag

SEQ ID NO: 41094 - DNA, 20 bp, Actinomyces bovis
gtaatagttatggcggatac

SEQ ID NO: 41095 - DNA, 20 bp, Pseudoramibacter alactolyticus
atcctctgacgagcctagag

SEQ ID NO: 41096 - DNA, 20 bp, Actinomyces meyeri
cccatggcctaaccggtttt

SEQ ID NO: 41097 - DNA, 20 bp, Weissella paramesenteroides
taccgtataataccaacaac

SEQ ID NO: 41098 - DNA, 20 bp, Prevotella loescheii
gtttttgcaggtaccgcatg

SEQ ID NO: 41099 - DNA, 20 bp, Brevibacillus thermoruber
cgcaagcccgcgagggtaag

SEQ ID NO: 41100 - DNA, 20 bp, Tetragenococcus halophilus
gttgtcagcaaagaacagga

SEQ ID NO: 41101 - DNA, 20 bp, Campylobacter curvus
ctaagctagtcttggcagta

SEQ ID NO: 41102 - DNA, 20 bp, Helcococcus kunzii
aaagcgcagctacctcgtga

SEQ ID NO: 41103 - DNA, 20 bp, Gemella sanguinis
tatatacagtagagacggta

SEQ ID NO: 41104 - DNA, 20 bp, Bacillus schlegellii
tgctaataccggatagattg

SEQ ID NO: 41105 - DNA, 20 bp, Enterobacter gergoviae
gaggaagggagtgaggttaa

SEQ ID NO: 41106 - DNA, 20 bp, Prevotella intermedia
ggagaggtcagtgggatgtc

SEQ ID NO: 41107 - DNA, 20 bp, Listeria innocua
gatagagtgtggcgcatgcc

SEQ ID NO: 41108 - DNA, 20 bp, Bacteroides forsythus
cggcgtaagctgtgaggaag

SEQ ID NO: 41109 - DNA, 20 bp, Eschericchia vulneris
tacacggtccagtactccta

SEQ ID NO: 41110 - DNA, 20 bp, Leuconostoc pseudomesenteroides
ttaaaaggcgctttggcgtc

SEQ ID NO: 41111 - DNA, 20 bp, Propionibacterium freudenreichii
gggagaatggaactctcggt

SEQ ID NO: 41112 - DNA, 20 bp, Peptoniphilus indolicus
cttcccttcggggacagtat

SEQ ID NO: 41113 - DNA, 20 bp, Veillonella atypica
aacgcgtaatcaacctgccc

SEQ ID NO: 41114 - DNA, 20 bp, Moraxella atlantae
cttatagagggggatagctc

SEQ ID NO: 41115 - DNA, 20 bp, Streptococcus hyovaginalis
accattaatcatgagtcgcg

SEQ ID NO: 41116 - DNA, 20 bp, Fusobacterium nucleatum
gtttcagtgtcccttcgggg

SEQ ID NO: 41117 - DNA, 20 bp, Peptostreptococcus anaerobius
ccgattatccaaccgcaagg

SEQ ID NO: 41118 - DNA, 20 bp, Acinetobacter lwoffii
taccgagattaatactcttg

SEQ ID NO: 41119 - DNA, 20 bp, Leuconostoc lactis
tcgaacgcactctcgtttag

SEQ ID NO: 41120 - DNA, 20 bp, Campylobacter lari
agtattaagagagcttgctc

SEQ ID NO: 41121 - DNA, 20 bp, Bacteroides capilosus
  misc_feature (4)..(4): n is a, c, g, or t
actngatgaataagccacgg

SEQ ID NO: 41122 - DNA, 20 bp, Facklamia sourekii
gttattagagaagaacagtc

SEQ ID NO: 41123 - DNA, 20 bp, Campylobacter rectus
taagtcgggaaagtttttcg

SEQ ID NO: 41124 - DNA, 20 bp, Peptostreptococcus anaerobius
gacatcccttagaccggtgt

SEQ ID NO: 41125 - DNA, 20 bp, Vibrio cholerae
tccggtagcgcaaggcccga

SEQ ID NO: 41126 - DNA, 20 bp, Pasteurella multocida
gggtgggacctcttggccac

SEQ ID NO: 41127 - DNA, 20 bp, Campylobacter lari
gttgctaacacttcgggtga

SEQ ID NO: 41128 - DNA, 20 bp, Eggerthella lenta
gtaggcggcctctcaagcgg

SEQ ID NO: 41129 - DNA, 20 bp, Corynebacterium glucuronolyticum
cctgggcttgacatatgtga

SEQ ID NO: 41130 - DNA, 20 bp, Haemophilus segnis
ctaggtgattgacgttaact

SEQ ID NO: 41131 - DNA, 20 bp, Brevibacillus choshinensis
atccgaaaagaaaaggcggc

SEQ ID NO: 41132 - DNA, 20 bp, Bacillus badius
gctgtcgcttacagatggac

SEQ ID NO: 41133 - DNA, 20 bp, Bacillus lentus
ggaagaccctgtctccaggg

SEQ ID NO: 41134 - DNA, 20 bp, Morganella morganii
aagtcgggcggtaacaggga

SEQ ID NO: 41135 - DNA, 20 bp, Streptococcus infantarius
ccgcataacagcatttaacc

SEQ ID NO: 41136 - DNA, 20 bp, Acinetobacter johnsonii
caccatgggaatttgttgca

SEQ ID NO: 41137 - DNA, 20 bp, Streptococcus suis
taccgcataacagtatttac

SEQ ID NO: 41138 - DNA, 20 bp, Porphyromonas endodontalis
tcaactgtagtcttgccgtt

SEQ ID NO: 41139 - DNA, 20 bp, Streptococcus gallolyticus
atgttagagacttgaaagat

SEQ ID NO: 41140 - DNA, 20 bp, Paenibacillus amylolyticus
gtttaaggccaaggctcaac

SEQ ID NO: 41141 - DNA, 20 bp, Porphyromonas endodontalis
agtcagtggtgaaaagctgc

SEQ ID NO: 41142 - DNA, 20 bp, Propionibacterium freudenreichii
cggggggtacacgagtggcg

SEQ ID NO: 41143 - DNA, 20 bp, Morganella morganii
aaggcaagcggaactcataa

SEQ ID NO: 41144 - DNA, 20 bp, Streptococcus sp.
ccgcataaaattgattattg

SEQ ID NO: 41145 - DNA, 20 bp, Vibrio cholerae
ttaaggtattaacttaacca

SEQ ID NO: 41146 - DNA, 20 bp, Brochothrix campestris
ctaataccgaatgtgctgaa

SEQ ID NO: 41147 - DNA, 20 bp, Eschericchia vulneris
aactgagtacacggtccagt

SEQ ID NO: 41148 - DNA, 20 bp, Neisseria subflava
ctgaactgggtgactcgagt

SEQ ID NO: 41149 - DNA, 20 bp, Bacillus schlegellii
gtgctaataccggatagatt

SEQ ID NO: 41150 - DNA, 20 bp, Methylobacterium mesophilicum
cagagagatttggggtccac

SEQ ID NO: 41151 - DNA, 20 bp, Facklamia ignava
taacggcctaccgtggcttt

SEQ ID NO: 41152 - DNA, 20 bp, Staphylococcus pulvereri
ttttattaggagctagccgt

SEQ ID NO: 41153 - DNA, 20 bp, Bacteroides thetaiotaomicron
gatggtataatcagaccgca

SEQ ID NO: 41154 - DNA, 20 bp, Helcococcus kunzii
cttgacatatacagggatat

SEQ ID NO: 41155 - DNA, 20 bp, Oligella urethralis
gtcccacacgcgagatggct

SEQ ID NO: 41156 - DNA, 20 bp, Alloiococcus otitis
tggaacggcattggaaactg

SEQ ID NO: 41157 - DNA, 20 bp, Salmonella enteritidis
cacagaagaatccagagatg

SEQ ID NO: 41158 - DNA, 20 bp, Dermacoccus nishinomiyaensis
tgttggtggaaagtttttgt

SEQ ID NO: 41159 - DNA, 20 bp, Prevotella melaninogenica
ttgaagtaaagatttatcgg

SEQ ID NO: 41160 - DNA, 20 bp, Listeria monocytogenes
tgccacgcttttgaaagatg

SEQ ID NO: 41161 - DNA, 20 bp, Corynebacterium glucuronolyticum
agtgatctgccctgcactgg

SEQ ID NO: 41162 - DNA, 20 bp, Bacillus sp
ggagagagattgaaagatgg

SEQ ID NO: 41163 - DNA, 20 bp, Prevotella bivia
gcccataactaagggataac

SEQ ID NO: 41164 - DNA, 20 bp, Neisseria lactamica
gtcggggaagaaaaggtcgg

SEQ ID NO: 41165 - DNA, 20 bp, Fusobacterium nucleatum
atacctaatattatgataat

SEQ ID NO: 41166 - DNA, 20 bp, Campylobacter curvus
tgctaataccttatactccg

SEQ ID NO: 41167 - DNA, 20 bp, Oligella urethralis
catcttaaggtattagccta

SEQ ID NO: 41168 - DNA, 20 bp, Fusobacterium nucleatum
acagagagttgcaaagccgt

SEQ ID NO: 41169 - DNA, 20 bp, Neisseria meningitidis
ccgtcatcagccgctgatat

SEQ ID NO: 41170 - DNA, 20 bp, Aerococcus urinae
gccttgcggtgcattagctc

SEQ ID NO: 41171 - DNA, 20 bp, Prevotella disiens
tccaacctgccctttacttg

SEQ ID NO: 41172 - DNA, 20 bp, Haemophilus segnis
ggcggctatttaagtgaggt

SEQ ID NO: 41173 - DNA, 20 bp, Pediococcus acidilactici
atgagattttaacacgaagt

SEQ ID NO: 41174 - DNA, 20 bp, Clostridium butyricum
agaggaaaggagaattccta

SEQ ID NO: 41175 - DNA, 20 bp, Corynebacterium glucuronolyticum
atcgtggttggtgtggtgga

SEQ ID NO: 41176 - DNA, 20 bp, Paenibacillus amylolyticus
gtagagtaactgctatcgga

SEQ ID NO: 41177 - DNA, 20 bp, Pasteurella trehalosi
tgatgaggaaggtgttttgt

SEQ ID NO: 41178 - DNA, 20 bp, Bacillus pallidus
aagtgttagagggtatccac

SEQ ID NO: 41179 - DNA, 20 bp, Cardiobacterium hominis
tgcccaagtcagatgtgaaa

SEQ ID NO: 41180 - DNA, 20 bp, Tissierella praeacuta
aaactgaaaggcttgagtta

SEQ ID NO: 41181 - DNA, 20 bp, Bacteroides stercoris
tggtgctaatcccgaaagcc

SEQ ID NO: 41182 - DNA, 20 bp, Morganella morganii
tcgcgccatcagatgaaccc

SEQ ID NO: 41183 - DNA, 20 bp, Bacillus megaterium
ccttcatgggagatgattga

SEQ ID NO: 41184 - DNA, 20 bp, Anaerococcus tetradius
gaataaggtccggctaaata

SEQ ID NO: 41185 - DNA, 20 bp, Bacillus lentus
tccaggcggaaagataatct

SEQ ID NO: 41186 - DNA, 20 bp, Bacteroides ovatus
agaatatattggaaacagta

SEQ ID NO: 41187 - DNA, 20 bp, Moraxella osloensis
gatactggtggtgctagaat

SEQ ID NO: 41188 - DNA, 20 bp, Arcanobacterium bernardiae
agagtgtggtaggggtaatt

SEQ ID NO: 41189 - DNA, 20 bp, Yersinia ruckeri
actgaacattgacgttactc

SEQ ID NO: 41190 - DNA, 20 bp, Prevotella bivia
agatgaacgatttagagata

SEQ ID NO: 41191 - DNA, 20 bp, Porphyromonas endodontalis
aataacccggtgaaagtcgg

SEQ ID NO: 41192 - DNA, 20 bp, Streptococcus infantarius
caaactttagcaagctaagt

SEQ ID NO: 41193 - DNA, 20 bp, Streptococcus hyovaginalis
agtgaccatcctagagatag

SEQ ID NO: 41194 - DNA, 20 bp, Anaerococcus prevotii
gtcgagcgatgaaatcttga

SEQ ID NO: 41195 - DNA, 20 bp, Facklamia hominis
ttagcggagtgacggtatct

SEQ ID NO: 41196 - DNA, 20 bp, Enterobacter cloacae
aggaaggcgacagggttaat

SEQ ID NO: 41197 - DNA, 20 bp, Bacillus lentus
cgtccgccgctaaccaacaa

SEQ ID NO: 41198 - DNA, 20 bp, Sporosarcina pasteurii
tgtccccgaagggaaaggta

SEQ ID NO: 41199 - DNA, 20 bp, Gemella bergeri
taacacctgaagacggtgac

SEQ ID NO: 41200 - DNA, 20 bp, Neisseria polysaccharea
ttgctaatatcagcggctga

SEQ ID NO: 41201 - DNA, 20 bp, Facklamia sourekii
gacggagaaacttgtttctc

SEQ ID NO: 41202 - DNA, 20 bp, Arcanobacterium bernardiae
tctgctttcatcgcatggtg

SEQ ID NO: 41203 - DNA, 20 bp, Bacteroides ureolyticus
tgatagtctagagtagggga

SEQ ID NO: 41204 - DNA, 20 bp, Acinetobacter genospecies 3
cggagagaggtagcttgcta

SEQ ID NO: 41205 - DNA, 20 bp, Corynebacterium glucuronolyticum
atgtgagattgggctagaga

SEQ ID NO: 41206 - DNA, 20 bp, Photobacterium damselae
atacagagggcagcaagacc

SEQ ID NO: 41207 - DNA, 20 bp, Peptostreptococcus anaerobius
agtgttagcggtataggatg

SEQ ID NO: 41208 - DNA, 20 bp, Plesiomonas shigelloides
gaccaaagtgggggctcttc

SEQ ID NO: 41209 - DNA, 20 bp, Prevotella loescheii
tgatacgcgaggaaccttac

SEQ ID NO: 41210 - DNA, 20 bp, Capnocytophaga gingivalis
gaaggcaggggactaacaga

SEQ ID NO: 41211 - DNA, 20 bp, Fusobacterium mortiferum
gcggcatcgtttttatatta

SEQ ID NO: 41212 - DNA, 20 bp, Streptococcus pyogenes
gggagtggaaaatccaccaa

SEQ ID NO: 41213 - DNA, 20 bp, Streptococcus acidominimus
taccgcataatagtgtttac

SEQ ID NO: 41214 - DNA, 20 bp, Moraxella osloensis
caagtcgaacgatgactctc

SEQ ID NO: 41215 - DNA, 20 bp, Fusobacterium nucleatum
gagacagagatgtttcagtg

SEQ ID NO: 41216 - DNA, 20 bp, Campylobacter sputorum
ttaatttttaaatctaaata

SEQ ID NO: 41217 - DNA, 20 bp, Clostridium innocuum
atgggagtcagtaatacccg

SEQ ID NO: 41218 - DNA, 20 bp, Streptococcus hyovaginalis
taatgatttaaaaggagcaa

SEQ ID NO: 41219 - DNA, 20 bp, Aneurinibacillus thermoaerophilus
cgggatgacctcccggtctg

SEQ ID NO: 41220 - DNA, 20 bp, Granulicatella elegans
gcgagcgcaggcggtcaatt

SEQ ID NO: 41221 - DNA, 20 bp, Achromobacter xylosoxidans
taccccgcggaactgacggt

SEQ ID NO: 41222 - DNA, 20 bp, Haemophilus paraphrophilus
atagcgcaacaaattgacgt

SEQ ID NO: 41223 - DNA, 20 bp, Pseudoramibacter alactolyticus
gaaattagaactggaaagtg

SEQ ID NO: 41224 - DNA, 20 bp, Streptococcus uberis
ttaaaaggggcaaatgcttc

SEQ ID NO: 41225 - DNA, 20 bp, Streptococcus dysgalactiae
gggagtggaaaatccaccat

SEQ ID NO: 41226 - DNA, 20 bp, Bacteroides capilosus
gactgaccccctccgtgccg

SEQ ID NO: 41227 - DNA, 20 bp, Bacteroides vulgatus
acgcgagtggatgccaatcc

SEQ ID NO: 41228 - DNA, 20 bp, Tetragenococcus halophilus
ccgcatatggctttttttca

SEQ ID NO: 41229 - DNA, 20 bp, Gemella bergeri
gacaacacagatacaggtgg

SEQ ID NO: 41230 - DNA, 20 bp, Arcanobacterium bernardiae
tttttggttgagggtatgtg

SEQ ID NO: 41231 - DNA, 20 bp, Acinetobacter baumannii
gggaaggtagcttgctaccg

SEQ ID NO: 41232 - DNA, 20 bp, Bacteroides ureolyticus
gtaaactccttttatcagga

SEQ ID NO: 41233 - DNA, 20 bp, Streptococcus thermophilus
atgtcatttatttgaaaggg

SEQ ID NO: 41234 - DNA, 20 bp, Bacteroides uniformis
tggcatagttcttccgcatg

SEQ ID NO: 41235 - DNA, 20 bp, Capnocytophaga gingivalis
gaagttcttggaatgtgtag

SEQ ID NO: 41236 - DNA, 20 bp, Pseudoramibacter alactolyticus
aacgagaaggttttgaatga

SEQ ID NO: 41237 - DNA, 20 bp, Methylobacterium mesophilicum
tttgacatggcgtgttatgg

SEQ ID NO: 41238 - DNA, 20 bp, Bordetella bronchiseptica
atatcctgtgcaactgacgg

SEQ ID NO: 41239 - DNA, 20 bp, Leptotrichia buccalis
ttcactggacggtaactgac

SEQ ID NO: 41240 - DNA, 20 bp, Bacteroides forsythus
accggatgccaatctccaaa

SEQ ID NO: 41241 - DNA, 20 bp, Bacteroides uniformis
gtatgtaccgtatgaataag

SEQ ID NO: 41242 - DNA, 20 bp, Bacillus sp
ctagggccgtcagaggatgt

SEQ ID NO: 41243 - DNA, 20 bp, Leptotrichia buccalis
agcctgccctggaaactgtt

SEQ ID NO: 41244 - DNA, 20 bp, Corynebacterium accolens
accgcataagagtagatgtt

SEQ ID NO: 41245 - DNA, 20 bp, Leptotrichia buccalis
gcacgcatgtgcccggcaat

SEQ ID NO: 41246 - DNA, 20 bp, Citrobacter farmeri
taaccttagccattgacgtt

SEQ ID NO: 41247 - DNA, 20 bp, Lactococcus garvieae
atcccgcgttgtattagcta

SEQ ID NO: 41248 - DNA, 20 bp, Burkholderia gladioli
gaaatcctgagggctaatat

SEQ ID NO: 41249 - DNA, 20 bp, Rothia mucilaginosa
tacgtgagtaacctaccttt

SEQ ID NO: 41250 - DNA, 20 bp, Prevotella intermedia
attatgtgcttgcacattct

SEQ ID NO: 41251 - DNA, 20 bp, Bacillus pumilus
ggatagttccttgaaccgca

SEQ ID NO: 41252 - DNA, 20 bp, Prevotella bivia
ggatgcccgctgttagcacc

SEQ ID NO: 41253 - DNA, 20 bp, Prevotella intermedia
cggtctgttaagcgtgttgt

SEQ ID NO: 41254 - DNA, 20 bp, Clostridium botulinum
gagagggatagcctttcgaa

SEQ ID NO: 41255 - DNA, 20 bp, Campylobacter sputorum
atacttattgcgaaggcgat

SEQ ID NO: 41256 - DNA, 20 bp, Veillonella atypica
gatttgacggtaccggaata

SEQ ID NO: 41257 - DNA, 20 bp, Prevotella intermedia
ggcattatgtgcttgcacat

SEQ ID NO: 41258 - DNA, 20 bp, Bacillus fusiformis
cccgttgaccactgtagaga

SEQ ID NO: 41259 - DNA, 20 bp, Paenibacillus larvae
tgcggaaacgtgagctaata

SEQ ID NO: 41260 - DNA, 20 bp, Brochothrix campestris
atgttcaagtgaaagacggt

SEQ ID NO: 41261 - DNA, 20 bp, Actinomyces neuii
cgggcttaacccgggtttgc

SEQ ID NO: 41262 - DNA, 20 bp, Veillonella parvula
atacgatctaacctcggcat

SEQ ID NO: 41263 - DNA, 20 bp, Bacillus sp
ctccgcatggagagagattg

SEQ ID NO: 41264 - DNA, 20 bp, Acinetobacter johnsonii
gtagcttgctacctaaccta

SEQ ID NO: 41265 - DNA, 20 bp, Actinomyces bovis
ggcttaaccccgtgatgcca

SEQ ID NO: 41266 - DNA, 20 bp, Alcaligenes faecalis
taatactgacgctcagacac

SEQ ID NO: 41267 - DNA, 20 bp, Gemella bergeri
agagatcagtgctgcagcaa

SEQ ID NO: 41268 - DNA, 20 bp, Moraxella lacunata
cagtcgttgggtctcttgaa

SEQ ID NO: 41269 - DNA, 20 bp, Neisseria meningitidis
gtaccgtcatcagccgctga

SEQ ID NO: 41270 - DNA, 20 bp, Peptoniphilus indolicus
atcaaagtgaattagcggtc

SEQ ID NO: 41271 - DNA, 20 bp, Turicella otitidis
cttttcacgactttcgtgcc

SEQ ID NO: 41272 - DNA, 20 bp, Dermacoccus nishinomiyaensis
agtttttgtggtgggggatg

SEQ ID NO: 41273 - DNA, 20 bp, Anaerococcus tetradius
ctggtcatcatctgacgctg

SEQ ID NO: 41274 - DNA, 20 bp, Prevotella disiens
atccaacctgccctttactt

SEQ ID NO: 41275 - DNA, 20 bp, Streptococcus infantarius
tcgcaactcttcaaacttta

SEQ ID NO: 41276 - DNA, 20 bp, Bacteroides merdae
aatggccgagaggctgaacc

SEQ ID NO: 41277 - DNA, 20 bp, Delftia acidovorans
aaagcttctcctaatacgag

SEQ ID NO: 41278 - DNA, 20 bp, Bacillus pallidus
accgaaaaccgcatggtttt

SEQ ID NO: 41279 - DNA, 20 bp, Propionibacterium propionicus
aacgtctagagataggcgcc

SEQ ID NO: 41280 - DNA, 20 bp, Bacillus coagulans
gacttggaggctgttcccct

SEQ ID NO: 41281 - DNA, 20 bp, Prevotella bivia
aggccgtttggtaagcgtgt

SEQ ID NO: 41282 - DNA, 20 bp, Fusobacterium nucleatum
cagagagttgcaaagccgtg

SEQ ID NO: 41283 - DNA, 20 bp, Prevotella intermedia
cacgcaacgtatgcggaatt

SEQ ID NO: 41284 - DNA, 20 bp, Prevotella intermedia
cgcaacgtatgcggaattca

SEQ ID NO: 41285 - DNA, 20 bp, Enterococcus casseliflavus
ctattttccgcatggaagaa

SEQ ID NO: 41286 - DNA, 20 bp, Campylobacter lari
cacaagttgagtagggaaag

SEQ ID NO: 41287 - DNA, 20 bp, Gemella bergeri
gctttgcggagcattagcta

SEQ ID NO: 41288 - DNA, 20 bp, Bacteroides merdae
tggtcaatggccgagaggct

SEQ ID NO: 41289 - DNA, 20 bp, Serratia proteamaculans
cgaggaggaagggtagtgtg

SEQ ID NO: 41290 - DNA, 20 bp, Gemella bergeri
agggaagaaaggttgtgtag

SEQ ID NO: 41291 - DNA, 20 bp, Bacillus alcalophilus
tgtaaaagatggctccggct

SEQ ID NO: 41292 - DNA, 20 bp, Alcaligenes faecalis
actgctgacggtatctgcag

SEQ ID NO: 41293 - DNA, 20 bp, Prevotella bivia
agcgtaggccgtttggtaag

SEQ ID NO: 41294 - DNA, 20 bp, Acinetobacter calcoaceticus
tggtgcttgcactatcactt

SEQ ID NO: 41295 - DNA, 20 bp, Neisseria lactamica
ttgtcggggaagaaaaggtc

SEQ ID NO: 41296 - DNA, 20 bp, Bacillus alcalophilus
agggagcttgctcccagagg

SEQ ID NO: 41297 - DNA, 20 bp, Veillonella parvula
gcatacgatctaacctcggc

SEQ ID NO: 41298 - DNA, 20 bp, Burkholderia multivorans
ccctggctctaatacagtcg

SEQ ID NO: 41299 - DNA, 20 bp, Moraxella lacunata
accagcgatttaagtcggga

SEQ ID NO: 41300 - DNA, 20 bp, Brevibacillus choshinensis
gaccgcatggtctgaaaggg

SEQ ID NO: 41301 - DNA, 20 bp, Tetragenococcus halophilus
gaaatgctttttccatgacg

SEQ ID NO: 41302 - DNA, 20 bp, Moraxella osloensis
gatgactctctagcttgcta

SEQ ID NO: 41303 - DNA, 20 bp, Leptotrichia buccalis
gagtgctggagaggtggacg

SEQ ID NO: 41304 - DNA, 20 bp, Facklamia ignava
aactggtcaacttgagtaca

SEQ ID NO: 41305 - DNA, 20 bp, Paenibacillus validus
accggatagctggtttctcc

SEQ ID NO: 41306 - DNA, 20 bp, Brevibacillus centrosporus
cggcgcaagctatcacttac

SEQ ID NO: 41307 - DNA, 20 bp, Bacteroides ovatus
ggagcgtaggtggattgtta

SEQ ID NO: 41308 - DNA, 20 bp, Comamonas terrigena
catgagaactgaggttgaaa

SEQ ID NO: 41309 - DNA, 20 bp, Delftia acidovorans
ttctcctaatacgagaggcc

SEQ ID NO: 41310 - DNA, 20 bp, Dolosicoccus paucivorans
catagcttagagataagtga

SEQ ID NO: 41311 - DNA, 20 bp, Streptococcus porcinus
cttaaaaggggcaactgctc

SEQ ID NO: 41312 - DNA, 20 bp, Anaerococcus prevotii
tggaagatacaaagggaagc

SEQ ID NO: 41313 - DNA, 20 bp, Bacteroides fragilis
agcaatcaccgctgtgaagg

SEQ ID NO: 41314 - DNA, 20 bp, Paenibacillus thiaminolyticus
gagtaactgttccataggtg

SEQ ID NO: 41315 - DNA, 20 bp, Cedecea neteri
ctgggttcatctgatggcaa

SEQ ID NO: 41316 - DNA, 20 bp, Brevibacillus laterosporus
tgtaagtctgatgttaaagc

SEQ ID NO: 41317 - DNA, 20 bp, Vibrio cholerae
tctacagtactctagcttgt

SEQ ID NO: 41318 - DNA, 20 bp, Brevibacillus choshinensis
ggatggaacaacgggcagcc

SEQ ID NO: 41319 - DNA, 20 bp, Bacteroides thetaiotaomicron
tttcagtttgcttgcaaact

SEQ ID NO: 41320 - DNA, 20 bp, Dermacoccus nishinomiyaensis
agcaccagcttgctggtgtg

SEQ ID NO: 41321 - DNA, 20 bp, Prevotella melaninogenica
tgttggtacctggtatcagc

SEQ ID NO: 41322 - DNA, 20 bp, Cardiobacterium hominis
tgggaatctgccttttgctg

SEQ ID NO: 41323 - DNA, 20 bp, Fusobacterium varium
ctttcagttgggaagaagtc

SEQ ID NO: 41324 - DNA, 20 bp, Corynebacterium group F
atattgttgtggaaagcttt

SEQ ID NO: 41325 - DNA, 20 bp, Paenibacillus validus
ctgctctgagggtgacggta

SEQ ID NO: 41326 - DNA, 20 bp, Pasteurella trehalosi
caaagcaattgacgttagtc

SEQ ID NO: 41327 - DNA, 20 bp, Fusobacterium mortiferum
ttgacatcctaagaaattag

SEQ ID NO: 41328 - DNA, 20 bp, Brochothrix campestris
ccggtttggtaaccttcggg

SEQ ID NO: 41329 - DNA, 20 bp, Facklamia sourekii
tggcgttaacgcaataaaca

SEQ ID NO: 41330 - DNA, 20 bp, Helcococcus ovis
aataccttatgacacttaga

SEQ ID NO: 41331 - DNA, 20 bp, Prevotella intermedia
aaacggcattatgtgcttgc

SEQ ID NO: 41332 - DNA, 20 bp, Campylobacter lari
acaatgagatgcaatatcgc

SEQ ID NO: 41333 - DNA, 20 bp, Bacillus sp
gagcgaactgatgaagagct

SEQ ID NO: 41334 - DNA, 20 bp, Bacillus fusiformis
cagtagtaactggctgtacc

SEQ ID NO: 41335 - DNA, 20 bp, Proteus vulgaris
gcatctgaaactggttggct

SEQ ID NO: 41336 - DNA, 20 bp, Alicyclobacillus acidocaldarius
ccggcctgaaaggcagatta

SEQ ID NO: 41337 - DNA, 20 bp, Oligella ureolytica
cgtggctaataccgcatatt

SEQ ID NO: 41338 - DNA, 20 bp, Actinomyces neuii
tggtttcatggtttccgcgc

SEQ ID NO: 41339 - DNA, 20 bp, Pediococcus pentosaceus
taataccgtataacagagaa

SEQ ID NO: 41340 - DNA, 20 bp, Cardiobacterium hominis
gaacctagagacaggtgttg

SEQ ID NO: 41341 - DNA, 20 bp, Brevundimonas vesicularis
gtatgagagaggtgtgtgga

SEQ ID NO: 41342 - DNA, 20 bp, Streptococcus macacae
aggggcttagtgccgtagct

SEQ ID NO: 41343 - DNA, 20 bp, Fusobacterium nucleatum
agtcgcaaagctgtgaagtg

SEQ ID NO: 41344 - DNA, 20 bp, Alicyclobacillus acidocaldarius
cttcggcactggggtgtgtc

SEQ ID NO: 41345 - DNA, 20 bp, Clostridium ramosum
tataaaggaagaacggcggc

SEQ ID NO: 41346 - DNA, 20 bp, Bacillus alcalophilus
cggataatcaaaggaatcac

SEQ ID NO: 41347 - DNA, 20 bp, Prevotella corporis
aggcttcgatcggtaggggt

SEQ ID NO: 41348 - DNA, 20 bp, Bacteroides fragilis
cgttccattaggttgttggt

SEQ ID NO: 41349 - DNA, 20 bp, Anaerococcus prevotii
aacctgccttagacattggg

SEQ ID NO: 41350 - DNA, 20 bp, Fusobacterium nucleatum
caatagtgaaaggcggcttt

SEQ ID NO: 41351 - DNA, 20 bp, Leptotrichia buccalis
tagccaaggcggacgggtga

SEQ ID NO: 41352 - DNA, 20 bp, Bordetella bronchiseptica
atcctgtgcaactgacggta

SEQ ID NO: 41353 - DNA, 20 bp, Neisseria lactamica
ctgactgcttggtagcgaag

SEQ ID NO: 41354 - DNA, 20 bp, Sphingobacterium multivorum
atttataggatagagatggg

SEQ ID NO: 41355 - DNA, 20 bp, Gemella morbillorum
aataccggataacagtattt

SEQ ID NO: 41356 - DNA, 20 bp, Weissella paramesenteroides
aataccaacaaccgcatggt

SEQ ID NO: 41357 - DNA, 20 bp, Lactococcus lactis
ggatgagcagcgaacgggtg

SEQ ID NO: 41358 - DNA, 20 bp, Gemella haemolysans
tacacagtagagacggtacc

SEQ ID NO: 41359 - DNA, 20 bp, Facklamia ignava
aagaatagcctgtagagtaa

SEQ ID NO: 41360 - DNA, 20 bp, Leuconostoc gelidum
ctaaaaggcgctacggcgtc

SEQ ID NO: 41361 - DNA, 20 bp, Bacillus alcalophilus
tcccagaggttagcggcgga

SEQ ID NO: 41362 - DNA, 20 bp, Fusobacterium nucleatum
cagtgtcccttcggggaaac

SEQ ID NO: 41363 - DNA, 20 bp, Brevibacillus agri
gatggcttttcgctatcact

SEQ ID NO: 41364 - DNA, 20 bp, Neisseria polysaccharea
taatatcagcggctgatgac

SEQ ID NO: 41365 - DNA, 20 bp, Streptococcus anginosus
tgagaatggaaagttcatac

SEQ ID NO: 41366 - DNA, 20 bp, Anaerococcus prevotii
aagggaagcgaaatagtgat

SEQ ID NO: 41367 - DNA, 20 bp, Prevotella intermedia
ctgttaagcgtgttgtgaaa

SEQ ID NO: 41368 - DNA, 20 bp, Pasteurella multocida
tgaggaggaaagggtgggac

SEQ ID NO: 41369 - DNA, 20 bp, Peptostreptococcus anaerobius
caagtcggtggttaaaggct

SEQ ID NO: 41370 - DNA, 20 bp, Corynebacterium xerosis
actcctttcaccatcgacga

SEQ ID NO: 41371 - DNA, 20 bp, Vibrio cholerae
ccagcgtctccgctagattc

SEQ ID NO: 41372 - DNA, 20 bp, Sporosarcina pasteurii
tctataccggtcagcgggat

SEQ ID NO: 41373 - DNA, 20 bp, Anaerococcus prevotii
gattaataccaaatgaaatc

SEQ ID NO: 41374 - DNA, 20 bp, Gemella sanguinis
ataccggataacagcataaa

SEQ ID NO: 41375 - DNA, 20 bp, Bacteroides capilosus
aacttcttttatcagggacg

SEQ ID NO: 41376 - DNA, 20 bp, Bacteroides uniformis
actattaaagaatttcggtc

SEQ ID NO: 41377 - DNA, 20 bp, Actinomyces meyeri
ggggttggtggaaagggttt

SEQ ID NO: 41378 - DNA, 20 bp, Anaerococcus prevotii
caggcggaaatgcaagtcag

SEQ ID NO: 41379 - DNA, 20 bp, Bacteroides forsythus
gctcaccaagccatcgatgg

SEQ ID NO: 41380 - DNA, 20 bp, Actinomyces turicensis
ttgggataacggtcggaaac

SEQ ID NO: 41381 - DNA, 20 bp, Shewanella algae
agggtgtaagttaatacctt

SEQ ID NO: 41382 - DNA, 20 bp, Dermacoccus nishinomiyaensis
tggctctgctatcacttata

SEQ ID NO: 41383 - DNA, 20 bp, Peptostreptococcus anaerobius
gttctgttgcaggggaagat

SEQ ID NO: 41384 - DNA, 20 bp, Pseudoramibacter alactolyticus
attggggaagaaaacatgac

SEQ ID NO: 41385 - DNA, 20 bp, Corynebacterium glucuronolyticum
tacagtgcgtgtgcgacacc

SEQ ID NO: 41386 - DNA, 20 bp, Arcanobacterium bernardiae
gggtatgtgcagaagaagcg

SEQ ID NO: 41387 - DNA, 20 bp, Lactococcus lactis
tgtaccgactggatgagcag

SEQ ID NO: 41388 - DNA, 20 bp, Alicyclobacillus acidocaldarius
tccggcctgaaaggcagatt

SEQ ID NO: 41389 - DNA, 20 bp, Myroides odoratus
ttaaagggttcgtaggcggc

SEQ ID NO: 41390 - DNA, 20 bp, Abiotrophia defectiva
actgttatgcgtgtgacggt

SEQ ID NO: 41391 - DNA, 20 bp, Haemophilus influenzae
tgatgtgttaatagcacatc

SEQ ID NO: 41392 - DNA, 20 bp, Brevundimonas vesicularis
tatgagagaggtgtgtggaa

SEQ ID NO: 41393 - DNA, 20 bp, Dermacoccus nishinomiyaensis
atagtgaaagatggctctgc

SEQ ID NO: 41394 - DNA, 20 bp, Clostridium innocuum
ccaaaaagacttagtggcga

SEQ ID NO: 41395 - DNA, 20 bp, Bacteroides fragilis
gctagcgggtgaccgtatgc

SEQ ID NO: 41396 - DNA, 20 bp, Arcanobacterium bernardiae
atattctgctttcatcgcat

SEQ ID NO: 41397 - DNA, 20 bp, Anaerococcus tetradius
ttagaaggccttcgggttgt

SEQ ID NO: 41398 - DNA, 20 bp, Streptococcus constellatus
tagtttactaccccgtattc

SEQ ID NO: 41399 - DNA, 20 bp, Brochothrix campestris
cataagatgttcaagtgaaa

SEQ ID NO: 41400 - DNA, 20 bp, Prevotella oralis
gaccgcaagggtcggcctaa

SEQ ID NO: 41401 - DNA, 20 bp, Paenibacillus pabuli
gatgtacctttccttcggga

SEQ ID NO: 41402 - DNA, 20 bp, Clostridium ramosum
ctgttataaaggaagaacgg

SEQ ID NO: 41403 - DNA, 20 bp, Arcanobacterium bernardiae
gctttcatcgcatggtgggg

SEQ ID NO: 41404 - DNA, 20 bp, Bacillus schlegellii
agtcgtacaaggtaccgtac

SEQ ID NO: 41405 - DNA, 20 bp, Prevotella bivia
tacaatgggtggtacagata

SEQ ID NO: 41406 - DNA, 20 bp, Clostridium septicum
ggtatcaactccttccgtgc

SEQ ID NO: 41407 - DNA, 20 bp, Clostridium botulinum
acaataagacgcaagaccgt

SEQ ID NO: 41408 - DNA, 20 bp, Bacteroides fragilis
aaggcagctagcgggtgacc

SEQ ID NO: 41409 - DNA, 20 bp, Bacteroides forsythus
attgccgttgaaactggtag

SEQ ID NO: 41410 - DNA, 20 bp, Moraxella lacunata
gggtgactagagtaggtgag

SEQ ID NO: 41411 - DNA, 20 bp, Streptococcus constellatus
actgcatggtagatgtttaa

SEQ ID NO: 41412 - DNA, 20 bp, Bacteroides distasonis
cgtgagggatgaaggttcta

SEQ ID NO: 41413 - DNA, 20 bp, Haemophilus paraphrophilus
gaggaaggttgttgtgtgaa

SEQ ID NO: 41414 - DNA, 20 bp, Facklamia sourekii
agataggtgaaatcctacgg

SEQ ID NO: 41415 - DNA, 20 bp, Dermacoccus nishinomiyaensis
atggagtgttggtggaaagt

SEQ ID NO: 41416 - DNA, 20 bp, Brochothrix campestris
atggataatacaaagggtcg

SEQ ID NO: 41417 - DNA, 20 bp, Aerococcus christensenii
gtaaggaacctaccgataag

SEQ ID NO: 41418 - DNA, 20 bp, Anaerococcus tetradius
actttctggtcatcatctga

SEQ ID NO: 41419 - DNA, 20 bp, Finegoldia magna
agaagaaagctccggctaaa

SEQ ID NO: 41420 - DNA, 20 bp, Paenibacillus popilliae
acgccttgtagagtaactgc

SEQ ID NO: 41421 - DNA, 20 bp, Neisseria meningitidis
acacactcgagtcacccagt

SEQ ID NO: 41422 - DNA, 20 bp, Bacillus circulans
aaagctgaaagacggtttac

SEQ ID NO: 41423 - DNA, 20 bp, Veillonella atypica
taaagtcgatgattggggtg

SEQ ID NO: 41424 - DNA, 20 bp, Pseudomonas fluorescens
ctaatacgtgagtattttga

SEQ ID NO: 41425 - DNA, 20 bp, Bacteroides ovatus
cccgggcttaaattgcaaca

SEQ ID NO: 41426 - DNA, 20 bp, Methylobacterium mesophilicum
gctgccggaggatcggcccg

SEQ ID NO: 41427 - DNA, 20 bp, Streptococcus dysgalactiae
atggtgggagtggaaaatcc

SEQ ID NO: 41428 - DNA, 20 bp, Bacteroides thetaiotaomicron
gtaaggcaaatgtgaaggtg

SEQ ID NO: 41429 - DNA, 20 bp, Paenibacillus pabuli
tcaaccccggatcgcactgg

SEQ ID NO: 41430 - DNA, 20 bp, Tissierella praeacuta
tatgacacttaaatgtcgca

SEQ ID NO: 41431 - DNA, 20 bp, Anaerococcus tetradius
tggaaacgacgaataatacc

SEQ ID NO: 41432 - DNA, 20 bp, Morganella morganii
gggggacctccgggcctcgc

SEQ ID NO: 41433 - DNA, 20 bp, Brevibacillus choshinensis
ctccaatcctcagtgccgca

SEQ ID NO: 41434 - DNA, 20 bp, Bacillus megaterium
ccggataggatcttctcctt

SEQ ID NO: 41435 - DNA, 20 bp, Staphylococcus carnosus
gtaggtaactatgcgcacct

SEQ ID NO: 41436 - DNA, 20 bp, Lactobacillus acidophilus
aaccgaggaactgcatcgga

SEQ ID NO: 41437 - DNA, 20 bp, Tetragenococcus halophilus
gggaacctatccatcagcgg

SEQ ID NO: 41438 - DNA, 20 bp, Leptotrichia buccalis
aggtggacggaactgcacga

SEQ ID NO: 41439 - DNA, 20 bp, Eggerthella lenta
caagcgggatctctaatccg

SEQ ID NO: 41440 - DNA, 20 bp, Bacteroides capilosus
acaatggtggttaacagagg

SEQ ID NO: 41441 - DNA, 20 bp, Clostridium subterminale
atggttggtacaataagatg

SEQ ID NO: 41442 - DNA, 20 bp, Corynebacterium afermentans
tgggccaccgcttcaggtgt

SEQ ID NO: 41443 - DNA, 20 bp, Granulicatella elegans
agagcgaccggtgcttgcac

SEQ ID NO: 41444 - DNA, 20 bp, Clostridium paraputrificum
gtaatgtgggaagtcccttc

SEQ ID NO: 41445 - DNA, 20 bp, Tetragenococcus halophilus
gccgcaaggcctagcgaatc

SEQ ID NO: 41446 - DNA, 20 bp, Tissierella praeacuta
taagtcaaagcgtaaagcgg

SEQ ID NO: 41447 - DNA, 20 bp, Enterococcus saccharolyticus
tggaaaagaggagtggcgaa

SEQ ID NO: 41448 - DNA, 20 bp, Macrococcus caseolyticus
tagtaactgaacgtaccttg

SEQ ID NO: 41449 - DNA, 20 bp, Streptococcus pyogenes
aatttaaaaggggcaattgc

SEQ ID NO: 41450 - DNA, 20 bp, Haemophilus actinemycetemcomitans
caaattgacgttaaatacag

SEQ ID NO: 41451 - DNA, 20 bp, Microbacterium hominis
gctgcgatcgcatggtcagt

SEQ ID NO: 41452 - DNA, 20 bp, Staphylococcus carnosus
ctaatgccggataatatgca

SEQ ID NO: 41453 - DNA, 20 bp, Bacillus fusiformis
agaaggagcttgctccttcg

SEQ ID NO: 41454 - DNA, 20 bp, Clostridium tetani
ccctgaattactcgtaactg

SEQ ID NO: 41455 - DNA, 20 bp, Streptococcus parasanguinis
gcatcactaagagatggacc

SEQ ID NO: 41456 - DNA, 20 bp, Enterococcus raffinosus
ctatttgaaaggcgcttttg

SEQ ID NO: 41457 - DNA, 20 bp, Bacillus badius
gggaagaacaagtacggaag

SEQ ID NO: 41458 - DNA, 20 bp, Bacteroides capilosus
ccagggcttgacatccgact

SEQ ID NO: 41459 - DNA, 20 bp, Weeksella virosa
cgatagaactgccattgata

SEQ ID NO: 41460 - DNA, 20 bp, Streptococcus hyovaginalis
aacacatgttaatgatttaa

SEQ ID NO: 41461 - DNA, 20 bp, Veillonella dispar
ctcggcatcgaggatagatg

SEQ ID NO: 41462 - DNA, 20 bp, Streptococcus parauberis
agactggtgcttgcactagt

SEQ ID NO: 41463 - DNA, 20 bp, Pseudoramibacter alactolyticus
atgctaggtgttggggaaac

SEQ ID NO: 41464 - DNA, 20 bp, Peptostreptococcus anaerobius
gtgagataactgcccaccaa

SEQ ID NO: 41465 - DNA, 20 bp, Pasteurella multocida
aggaagggatgttgttaaat

SEQ ID NO: 41466 - DNA, 20 bp, Bacteroides uniformis
cccaccaagccttcgatgga

SEQ ID NO: 41467 - DNA, 20 bp, Actinomyces bovis
gcgaaggtaggatcgatgat

SEQ ID NO: 41468 - DNA, 20 bp, Bacteroides uniformis
cgacgtgatgctaatcccta

SEQ ID NO: 41469 - DNA, 20 bp, Peptostreptococcus anaerobius
ccggtgtttaatcacacctt

SEQ ID NO: 41470 - DNA, 20 bp, Acinetobacter genospecies 3
tggttagctagagtgtggga

SEQ ID NO: 41471 - DNA, 20 bp, Streptococcus constellatus
gtagtttactaccccgtatt

SEQ ID NO: 41472 - DNA, 20 bp, Porphyromonas levii
gaaactgttggtcttgaatg

SEQ ID NO: 41473 - DNA, 20 bp, Alicyclobacillus acidocaldarius
gtgtgtccccccaacaccta

SEQ ID NO: 41474 - DNA, 20 bp, Yersinia ruckeri
gttaatagcactgaacattg

SEQ ID NO: 41475 - DNA, 20 bp, Bacillus sp
agcttgcgccgccttttaac

SEQ ID NO: 41476 - DNA, 20 bp, Porphyromonas endodontalis
aacctgcctgtaattaggga

SEQ ID NO: 41477 - DNA, 20 bp, Pediococcus pentosaceus
aataccgtataacagagaaa

SEQ ID NO: 41478 - DNA, 20 bp, Bacillus fusiformis
gttgaccactgtagagatat

SEQ ID NO: 41479 - DNA, 20 bp, Actinomyces odontolyticus
gcacggcggcactgcagaga

SEQ ID NO: 41480 - DNA, 20 bp, Enterococcus casseliflavus
tattttccgcatggaagaaa

SEQ ID NO: 41481 - DNA, 20 bp, Corynebacterium auris
cctcttccacggggttcgtg

SEQ ID NO: 41482 - DNA, 20 bp, Clostridium sordellii
tctttcaagccagaagtgaa

SEQ ID NO: 41483 - DNA, 20 bp, Peptoniphilus indolicus
tcataacgatcaaagtgaat

SEQ ID NO: 41484 - DNA, 20 bp, Fusobacterium varium
ggtagtacagagagctgcaa

SEQ ID NO: 41485 - DNA, 20 bp, Paenibacillus validus
cgcatgggggaatcatgaaa

SEQ ID NO: 41486 - DNA, 20 bp, Bacteroides uniformis
tacagtagaggcaggcggaa

SEQ ID NO: 41487 - DNA, 20 bp, Fusobacterium nucleatum
gctaatacctaatattatga

SEQ ID NO: 41488 - DNA, 20 bp, Gemella morbillorum
ctaacctttaaggagggagc

SEQ ID NO: 41489 - DNA, 20 bp, Porphyromonas endodontalis
tgaaactgatatgctagaga

SEQ ID NO: 41490 - DNA, 20 bp, Streptococcus agalactiae
tgttagagaagaacgttggt

SEQ ID NO: 41491 - DNA, 20 bp, Propionibacterium avidum
agctcgtaggtggttgattg

SEQ ID NO: 41492 - DNA, 20 bp, Acinetobacter lwoffii
taatactcttggatagtgga

SEQ ID NO: 41493 - DNA, 20 bp, Campylobacter sputorum
aaatgagtgctaatacctca

SEQ ID NO: 41494 - DNA, 20 bp, Pediococcus inopinatus
ctaataccgcataataaagt

SEQ ID NO: 41495 - DNA, 20 bp, Propionibacterium freudenreichii
gctccaggaaactggtggta

SEQ ID NO: 41496 - DNA, 20 bp, Dietzia maris
cgtcgtttgtgaaaacccgg

SEQ ID NO: 41497 - DNA, 20 bp, Bacillus coagulans
gccgttcgaacagggcggcg

SEQ ID NO: 41498 - DNA, 20 bp, Unknown Organism
  oligonucleotide from CDC group EO-2
gagaaggatcagcccgcgtt

SEQ ID NO: 41499 - DNA, 20 bp, Methylobacterium extorquens
cgggtgtcagtggcagacgg

SEQ ID NO: 41500 - DNA, 20 bp, Streptococcus porcinus
ccttctgaccggcctagaga

SEQ ID NO: 41501 - DNA, 20 bp, Moraxella lacunata
tacaagccctgacgttaccc

SEQ ID NO: 41502 - DNA, 20 bp, Corynebacterium glucuronolyticum
ttcgtcagggacgaagtttt

SEQ ID NO: 41503 - DNA, 20 bp, Alicyclobacillus acidocaldarius
aagtcaagcagtttccaaag

SEQ ID NO: 41504 - DNA, 20 bp, Actinomyces neuii
gggcatcttggttcggatcg

SEQ ID NO: 41505 - DNA, 20 bp, Methylobacterium mesophilicum
ccgcagtagcgcagctaacg

SEQ ID NO: 41506 - DNA, 20 bp, Brevibacterium epidermidis
gaggcgaacccgtgagggta

SEQ ID NO: 41507 - DNA, 20 bp, Veillonella atypica
aaggaggggattgcgtctga

SEQ ID NO: 41508 - DNA, 20 bp, Bacteroides thetaiotaomicron
ggcagctcactggactgcaa

SEQ ID NO: 41509 - DNA, 20 bp, Lactococcus lactis
accgactggatgagcagcga

SEQ ID NO: 41510 - DNA, 20 bp, Pseudoramibacter alactolyticus
ggttttgaatgatccttcgg

SEQ ID NO: 41511 - DNA, 20 bp, Bacteroides forsythus
tgtaagctctacagcgaaag

SEQ ID NO: 41512 - DNA, 20 bp, Helcococcus ovis
ttacttgagtagatgagggg

SEQ ID NO: 41513 - DNA, 20 bp, Helcococcus kunzii
agaatttcggtgaaagatgg

SEQ ID NO: 41514 - DNA, 20 bp, Brevibacillus brevis
ccttttcctctcatgaggaa

SEQ ID NO: 41515 - DNA, 20 bp, Prevotella intermedia
tgcccgctgttagcgcctgg

SEQ ID NO: 41516 - DNA, 20 bp, Bacillus smithii
aaggcggcgcaagctgccgc

SEQ ID NO: 41517 - DNA, 20 bp, Stenotrophomonas maltophilia
cgactagaatgtggtagagg

SEQ ID NO: 41518 - DNA, 20 bp, Oligella ureolytica
gaagaaaagtcttaggctaa

SEQ ID NO: 41519 - DNA, 20 bp, Kingella denitrificans
gggaagaaaagggaagtgtt

SEQ ID NO: 41520 - DNA, 20 bp, Bacillus lentus
tctccaggcggaaagataat

SEQ ID NO: 41521 - DNA, 20 bp, Facklamia languida
ggacatccatacaggtggtg

SEQ ID NO: 41522 - DNA, 20 bp, Gemella haemolysans
ttggttagacacagatacag

SEQ ID NO: 41523 - DNA, 20 bp, Bordetella bronchiseptica
aagaaacggcacgggctaat

SEQ ID NO: 41524 - DNA, 20 bp, Chromobacterium violaceum
ccgtgtaatgggggatagct

SEQ ID NO: 41525 - DNA, 20 bp, Actinomyces neuii
ttttggccttgttgatggta

SEQ ID NO: 41526 - DNA, 20 bp, Bacillus lentus
tccagggcggtcaggagatg

SEQ ID NO: 41527 - DNA, 20 bp, Streptococcus constellatus
cgtattctgtgagttgcgaa

SEQ ID NO: 41528 - DNA, 20 bp, Bacteroides capilosus
gaaaaccacgggctcaacct

SEQ ID NO: 41529 - DNA, 20 bp, Prevotella corporis
agggataacctgccgaaagg

SEQ ID NO: 41530 - DNA, 20 bp, Granulicatella adiacens
cttgcactggtcaatctagt

SEQ ID NO: 41531 - DNA, 20 bp, Streptococcus sobrinus
gcttcactatcagatggacc

SEQ ID NO: 41532 - DNA, 20 bp, Clostridium tertium
agtcgagcgagaggagttcc

SEQ ID NO: 41533 - DNA, 20 bp, Weeksella virosa
gaaatcctatcgcttaacga

SEQ ID NO: 41534 - DNA, 20 bp, Bacteroides fragilis
ggcagctagcgggtgaccgt

SEQ ID NO: 41535 - DNA, 20 bp, Streptococcus infantarius
gttcgcaactcttcaaactt

SEQ ID NO: 41536 - DNA, 20 bp, Alcaligenes faecalis
ctcctaatacgaggtactgc

SEQ ID NO: 41537 - DNA, 20 bp, Yersinia ruckeri
gaacattgacgttactcgca

SEQ ID NO: 41538 - DNA, 20 bp, Klebsiella pneumoniae
ggccttcgggttgtaaagac

SEQ ID NO: 41539 - DNA, 20 bp, Streptococcus hyovaginalis
ggaaagtttactctgtgacg

SEQ ID NO: 41540 - DNA, 20 bp, Campylobacter lari
tcctgcttaacacaagttga

SEQ ID NO: 41541 - DNA, 20 bp, Collinsella aerofaciens
caccccgcgagggggagcgg

SEQ ID NO: 41542 - DNA, 20 bp, Fusobacterium varium
tggaaactgctaaactagag

SEQ ID NO: 41543 - DNA, 20 bp, Campylobacter curvus
cgctatgggatgaggctata

SEQ ID NO: 41544 - DNA, 20 bp, Bacteroides merdae
gatagataggcatgcgttcc

SEQ ID NO: 41545 - DNA, 20 bp, Enterococcus casseliflavus
ccgtataacactattttccg

SEQ ID NO: 41546 - DNA, 20 bp, Streptococcus equinus
cgcataacagcatttaacac

SEQ ID NO: 41547 - DNA, 20 bp, Anaerobiospirillum succiniciproducens
gggaacccacaaagcgtccc

SEQ ID NO: 41548 - DNA, 20 bp, Streptococcus parauberis
actaaatttaaaaggagcaa

SEQ ID NO: 41549 - DNA, 20 bp, Bacillus sp
ttgcttggcctcacggcttc

SEQ ID NO: 41550 - DNA, 20 bp, Gemella morbillorum
tctggtgcttgcactagaaa

SEQ ID NO: 41551 - DNA, 20 bp, Peptostreptococcus anaerobius
ataacatactgaaaagttta

SEQ ID NO: 41552 - DNA, 20 bp, Propionibacterium avidum
gctaataccggataggaatc

SEQ ID NO: 41553 - DNA, 20 bp, Corynebacterium xerosis
accgtgagggtgtggtggaa

SEQ ID NO: 41554 - DNA, 20 bp, Cardiobacterium hominis
cgatgtcaactaggcgtcgg

SEQ ID NO: 41555 - DNA, 20 bp, Bacteroides distasonis
tctatggatcgtaaacctct

SEQ ID NO: 41556 - DNA, 20 bp, Propionibacterium freudenreichii
gttcagagatgggcgtgcct

SEQ ID NO: 41557 - DNA, 20 bp, Gemella haemolysans
agggaagaatgattgtgtag

SEQ ID NO: 41558 - DNA, 20 bp, Helcococcus kunzii
atggtctgaacaaagcgcag

SEQ ID NO: 41559 - DNA, 20 bp, Bacillus coagulans
gttttttcctccgcatggag

SEQ ID NO: 41560 - DNA, 20 bp, Arcanobacterium bernardiae
acatacactgcgatgtgcca

SEQ ID NO: 41561 - DNA, 20 bp, Atopobium parvulum
ttaggagggagacgccgaag

SEQ ID NO: 41562 - DNA, 20 bp, Clostridium cadaveris
tagactgccgtggttaacgc

SEQ ID NO: 41563 - DNA, 20 bp, Bacteroides ovatus
gctgttgtgaaggtgctgca

SEQ ID NO: 41564 - DNA, 20 bp, Rothia mucilaginosa
cagagatggtgtttcccttc

SEQ ID NO: 41565 - DNA, 20 bp, Burkholderia gladioli
agaaatcctgagggctaata

SEQ ID NO: 41566 - DNA, 20 bp, Alicyclobacillus acidocaldarius
cgcctccctttgttccgccc

SEQ ID NO: 41567 - DNA, 20 bp, Corynebacterium ulcerans
aagatcggcgtagagatacg

SEQ ID NO: 41568 - DNA, 20 bp, Moraxella lacunata
agcttgtggttaatacctac

SEQ ID NO: 41569 - DNA, 20 bp, Veillonella atypica
aaagtcgatgattggggtga

SEQ ID NO: 41570 - DNA, 20 bp, Morganella morganii
ctcgcaccatcagatgaacc

SEQ ID NO: 41571 - DNA, 20 bp, Chromobacterium violaceum
gaacggcattggagactgca

SEQ ID NO: 41572 - DNA, 20 bp, Lactococcus lactis
gaagaacgttggtgagagtg

SEQ ID NO: 41573 - DNA, 20 bp, Bacteroides caccae
acacgtatccaacctacctc

SEQ ID NO: 41574 - DNA, 20 bp, Corynebacterium macginleyi
gataggaccgcactttagtg

SEQ ID NO: 41575 - DNA, 20 bp, Streptococcus gordonii
agaacgcacagtttataccg

SEQ ID NO: 41576 - DNA, 20 bp, Clostridium butyricum
atgagatgcaacctcgcgag

SEQ ID NO: 41577 - DNA, 20 bp, Streptococcus anginosus
cataacagtatgtaacacat

SEQ ID NO: 41578 - DNA, 20 bp, Staphylococcus equorum
tcgagcgaacggataaggag

SEQ ID NO: 41579 - DNA, 20 bp, Peptostreptococcus anaerobius
ctgccctatacacatggata

SEQ ID NO: 41580 - DNA, 20 bp, Corynebacterium glucuronolyticum
ttcgtcccttgtggctcatt

SEQ ID NO: 41581 - DNA, 20 bp, Streptococcus parasanguinis
tgttgacttgaaaggtgcaa

SEQ ID NO: 41582 - DNA, 20 bp, Oligella ureolytica
aacttgttccttgggtggcg

SEQ ID NO: 41583 - DNA, 20 bp, Staphylococcus aureus
aacggacgagaagcttgctt

SEQ ID NO: 41584 - DNA, 20 bp, Methylobacterium mesophilicum
tggggtgcttgcaccgcagt

SEQ ID NO: 41585 - DNA, 20 bp, Burkholderia gladioli
gtccggaaagaaatcctgag

SEQ ID NO: 41586 - DNA, 20 bp, Neisseria weaveri
agggaagaaaaggttgtggc

SEQ ID NO: 41587 - DNA, 20 bp, Aerococcus viridans
tcacttatagatgaccttgc

SEQ ID NO: 41588 - DNA, 20 bp, Eggerthella lenta
tctcaagcgggatctctaat

SEQ ID NO: 41589 - DNA, 20 bp, Clostridium ramosum
gagtgcaggagaggatcgtg

SEQ ID NO: 41590 - DNA, 20 bp, Anaerococcus prevotii
tgaagataagatggattagc

SEQ ID NO: 41591 - DNA, 20 bp, Streptococcus sanguinis
ataattaattgaaaggtgca

SEQ ID NO: 41592 - DNA, 20 bp, Lactococcus lactis
aaaactttaaacacaagttt

SEQ ID NO: 41593 - DNA, 20 bp, Bacillus sp
gtaagtgacagcttgcgccg

SEQ ID NO: 41594 - DNA, 20 bp, Corynebacterium afermentans
gtttcctctatatgtcaagc

SEQ ID NO: 41595 - DNA, 20 bp, Corynebacterium coyleae
ccggataggaccacattttg

SEQ ID NO: 41596 - DNA, 20 bp, Veillonella atypica
tgatggacagaactagagat

SEQ ID NO: 41597 - DNA, 20 bp, Bacillus pallidus
aacaccgaaaaccgcatggt

SEQ ID NO: 41598 - DNA, 20 bp, Tetragenococcus halophilus
tatggctttttttcacctga

SEQ ID NO: 41599 - DNA, 20 bp, Leuconostoc pseudomesenteroides
ccgaatgaaacttagtgtcg

SEQ ID NO: 41600 - DNA, 20 bp, Prevotella oris
gataaagtgagggacgtgtc

SEQ ID NO: 41601 - DNA, 20 bp, Acinetobacter baumannii
gggaaggtagcttgctactg

SEQ ID NO: 41602 - DNA, 20 bp, Pediococcus pentosaceus
acttccgttaattgattatg

SEQ ID NO: 41603 - DNA, 20 bp, Methylobacterium mesophilicum
caccgcagtagcgcagctaa

SEQ ID NO: 41604 - DNA, 20 bp, Helcococcus ovis
ttctggaatctaactgacgc

SEQ ID NO: 41605 - DNA, 20 bp, Corynebacterium glucuronolyticum
ccgcatcgtggttggtgtgg

SEQ ID NO: 41606 - DNA, 20 bp, Corynebacterium afermentans
cacctgtatagagaccttgc

SEQ ID NO: 41607 - DNA, 20 bp, Gemella morbillorum
ttgcactagaaaaacttagc

SEQ ID NO: 41608 - DNA, 20 bp, Streptococcus gordonii
attattgcatgataattaat

SEQ ID NO: 41609 - DNA, 20 bp, Photobacterium damselae
gcgacttaactgaaccttcg

SEQ ID NO: 41610 - DNA, 20 bp, Brevibacillus choshinensis
gtgcgcgaatcccttaaaac

SEQ ID NO: 41611 - DNA, 20 bp, Lactococcus garvieae
ttcgggacacgggatacagg

SEQ ID NO: 41612 - DNA, 20 bp, Bacteroides capilosus
agtccgaaaggactgctaat

SEQ ID NO: 41613 - DNA, 20 bp, Moraxella osloensis
accatgggagtctattgcac

SEQ ID NO: 41614 - DNA, 20 bp, Prevotella melaninogenica
ggggataaagtcaatcacgt

SEQ ID NO: 41615 - DNA, 20 bp, Arthrobacter globiformis
agatttattggtcttggatg

SEQ ID NO: 41616 - DNA, 20 bp, Methylobacterium extorquens
accttcgggtgtcagtggca

SEQ ID NO: 41617 - DNA, 20 bp, Anaerobiospirillum succiniciproducens
catggcccttacggcagggc

SEQ ID NO: 41618 - DNA, 20 bp, Facklamia ignava
ccgtggctttgatgcatagc

SEQ ID NO: 41619 - DNA, 20 bp, Gemella haemolysans
gcaccggaaaaacttagcgg

SEQ ID NO: 41620 - DNA, 20 bp, Lactococcus lactis
ctttgagcgggggacaacat

SEQ ID NO: 41621 - DNA, 20 bp, Haemophilus paraphrophilus
gatgaaagtgtgggaccttt

SEQ ID NO: 41622 - DNA, 20 bp, Paenibacillus apiarius
gtgtttaaacctagggctca

SEQ ID NO: 41623 - DNA, 20 bp, Leuconostoc pseudomesenteroides
accgaatgaaacttagtgtc

SEQ ID NO: 41624 - DNA, 20 bp, Neisseria meningitidis
gacacactcgagtcacccag

SEQ ID NO: 41625 - DNA, 20 bp, Paenibacillus apiarius
taaacctagggctcaacctt

SEQ ID NO: 41626 - DNA, 20 bp, Actinomyces naeslundii
taatacgggatattctgggt

SEQ ID NO: 41627 - DNA, 20 bp, Bacteroides fragilis
taatcccaaaatcctctctc

SEQ ID NO: 41628 - DNA, 20 bp, Fusobacterium varium
cagagatgttttcgtgcctc

SEQ ID NO: 41629 - DNA, 20 bp, Corynebacterium amycolatum
gacgaagggtttctgacggt

SEQ ID NO: 41630 - DNA, 20 bp, Pediococcus inopinatus
accgcatggttttcttttaa

SEQ ID NO: 41631 - DNA, 20 bp, Streptococcus thoraltensis
ggagtaagagtggaaagttt

SEQ ID NO: 41632 - DNA, 20 bp, Acinetobacter junii
aggaggaggctactgagact

SEQ ID NO: 41633 - DNA, 20 bp, Bacillus sp
cacatgcgtcacccccgaag

SEQ ID NO: 41634 - DNA, 20 bp, Leuconostoc argentinum
gaatgattctagttcgacgg

SEQ ID NO: 41635 - DNA, 20 bp, Prevotella denticola
tctgaattgcagcgcatact

SEQ ID NO: 41636 - DNA, 20 bp, Clostridium butyricum
cgcgagagtgagcaaaacta

SEQ ID NO: 41637 - DNA, 20 bp, Fusobacterium nucleatum
atattatgataatagggcat

SEQ ID NO: 41638 - DNA, 20 bp, Anaerococcus prevotii
cggcggtctaagatggactc

SEQ ID NO: 41639 - DNA, 20 bp, Weeksella virosa
ttcggacagaatgcaaggtg

SEQ ID NO: 41640 - DNA, 20 bp, Corynebacterium group F
gcgcgtttgctaccttgtga

SEQ ID NO: 41641 - DNA, 20 bp, Bacteroides forsythus
cgcttaacgataaaattgcc

SEQ ID NO: 41642 - DNA, 20 bp, Gemella bergeri
acacaaaacagacggtacct

SEQ ID NO: 41643 - DNA, 20 bp, Clostridium tetani
gaaactttaaccaaaggagt

SEQ ID NO: 41644 - DNA, 20 bp, Facklamia ignava
aagcactgttatcagagaag

SEQ ID NO: 41645 - DNA, 20 bp, Streptococcus constellatus
ccccgtattctgtgagttgc

SEQ ID NO: 41646 - DNA, 20 bp, Anaerococcus tetradius
tgagtgttaggtgtctggaa

SEQ ID NO: 41647 - DNA, 20 bp, Prevotella melaninogenica
gcagaggaaggatttagaga

SEQ ID NO: 41648 - DNA, 20 bp, Cardiobacterium hominis
aacttaggagggcgcttgcc

SEQ ID NO: 41649 - DNA, 20 bp, Bacillus cereus
cgaatggattgagagcttgc

SEQ ID NO: 41650 - DNA, 20 bp, Peptostreptococcus anaerobius
gaaacacccgaagccgatta

SEQ ID NO: 41651 - DNA, 20 bp, Haemophilus ducreyi
gtatacagagggcggcaaac

SEQ ID NO: 41652 - DNA, 20 bp, Vibrio cholerae
tcagtttcaaatgcgattcc

SEQ ID NO: 41653 - DNA, 20 bp, Clostridium innocuum
aacccttgtcgcatgttacc

SEQ ID NO: 41654 - DNA, 20 bp, Aerococcus christensenii
ctctgctatcacttatcgat

SEQ ID NO: 41655 - DNA, 20 bp, Veillonella parvula
tcagtcagtctgtcttaaaa

SEQ ID NO: 41656 - DNA, 20 bp, Clostridium ramosum
gccgagtgacggtactttat

SEQ ID NO: 41657 - DNA, 20 bp, Enterococcus dispar
ttttgcgtcacttgaggatg

SEQ ID NO: 41658 - DNA, 20 bp, Streptococcus equi
cttagagataagaagttact

SEQ ID NO: 41659 - DNA, 20 bp, Campylobacter sputorum
ttcgctatgggatgaggcta

SEQ ID NO: 41660 - DNA, 20 bp, Leptotrichia buccalis
tagatatgtgcaggaatgcc

SEQ ID NO: 41661 - DNA, 20 bp, Capnocytophaga gingivalis
atctgtgaagttcttggaat

SEQ ID NO: 41662 - DNA, 20 bp, Corynebacterium argentoratense
gatctgccctcaacttcggg

SEQ ID NO: 41663 - DNA, 20 bp, Chromobacterium violaceum
atgcgtcggaatgtaccgtg

SEQ ID NO: 41664 - DNA, 20 bp, Brevibacillus thermoruber
cgcaagctaccacttgcgga

SEQ ID NO: 41665 - DNA, 20 bp, Actinomyces bovis
tggagaaattcagtgctgta

SEQ ID NO: 41666 - DNA, 20 bp, Bacteroides fragilis
tgcagttgatactgtcagtc

SEQ ID NO: 41667 - DNA, 20 bp, Clostridium botulinum
taagacgcaagaccgtgagg

SEQ ID NO: 41668 - DNA, 20 bp, Porphyromonas endodontalis
aacccgcgtcgatagttact

SEQ ID NO: 41669 - DNA, 20 bp, Leuconostoc pseudomesenteroides
cgcatgacacaaagttaaaa

SEQ ID NO: 41670 - DNA, 20 bp, Leuconostoc lactis
ggtagtgacggtatccaacc

SEQ ID NO: 41671 - DNA, 20 bp, Moraxella osloensis
gcaagctcttgctattagat

SEQ ID NO: 41672 - DNA, 20 bp, Anaerobiospirillum succiniciproducens
gataccgtgaggtggagtgg

SEQ ID NO: 41673 - DNA, 20 bp, Streptococcus dysgalactiae
gcaactgcatcactatgaga

SEQ ID NO: 41674 - DNA, 20 bp, Abiotrophia defectiva
tagagtaactgttatgcgtg

SEQ ID NO: 41675 - DNA, 20 bp, Brevibacillus laterosporus
acttcgcgagaagatgctaa

SEQ ID NO: 41676 - DNA, 20 bp, Streptococcus agalactiae
gaggtttggtgtttacacta

SEQ ID NO: 41677 - DNA, 20 bp, Bacillus lentus
gcgtcgccgcttcgctgccc

SEQ ID NO: 41678 - DNA, 20 bp, Campylobacter sputorum
cgatagtgaaagatggcttt

SEQ ID NO: 41679 - DNA, 20 bp, Prevotella melaninogenica
tgtgggataacctgccgaaa

SEQ ID NO: 41680 - DNA, 20 bp, Actinomyces bovis
atactaagtgttggagaaat

SEQ ID NO: 41681 - DNA, 20 bp, Turicella otitidis
tcttttcacgactttcgtgc

SEQ ID NO: 41682 - DNA, 20 bp, Brochothrix campestris
aatacaaagggtcgcgaagc

SEQ ID NO: 41683 - DNA, 20 bp, Streptococcus porcinus
tgtcatctacttaaaagggg

SEQ ID NO: 41684 - DNA, 20 bp, Moraxella lacunata
acctacaagccctgacgtta

SEQ ID NO: 41685 - DNA, 20 bp, Clostridium tetani
gcatgaaactttaaccaaag

SEQ ID NO: 41686 - DNA, 20 bp, Methylobacterium mesophilicum
gtagcgcagctaacgctttg

SEQ ID NO: 41687 - DNA, 20 bp, Corynebacterium auris
gggcgctaggtgtgagcctc

SEQ ID NO: 41688 - DNA, 20 bp, Clostridium ramosum
tatgagatacaggtggtgca

SEQ ID NO: 41689 - DNA, 20 bp, Kytococcus sedentarius
aaccctggacgtgcagtggg

SEQ ID NO: 41690 - DNA, 20 bp, Corynebacterium group F
tgctaatcgcacaaagccgg

SEQ ID NO: 41691 - DNA, 20 bp, Corynebacterium striatum
acgtcctcccttgtggtttg

SEQ ID NO: 41692 - DNA, 20 bp, Leuconostoc pseudomesenteroides
agtgtcgcatgacacaaagt

SEQ ID NO: 41693 - DNA, 20 bp, Bacteroides caccae
cgttccattagtttgttggg

SEQ ID NO: 41694 - DNA, 20 bp, Gemella bergeri
tttggcctgcaactgacact

SEQ ID NO: 41695 - DNA, 20 bp, Streptococcus equi
catgttaaccatttaaaagg

SEQ ID NO: 41696 - DNA, 20 bp, Enterococcus casseliflavus
acactattttccgcatggaa

SEQ ID NO: 41697 - DNA, 20 bp, Streptococcus canis
cccattatgtgacggtaact

SEQ ID NO: 41698 - DNA, 20 bp, Tetragenococcus halophilus
aagtacaacgagcaagccaa

SEQ ID NO: 41699 - DNA, 20 bp, Corynebacterium glucuronolyticum
gtgcgtgtgcgacaccgtga

SEQ ID NO: 41700 - DNA, 20 bp, Rhodococcus equi
tactggataggaccgcactt

SEQ ID NO: 41701 - DNA, 20 bp, Bacillus cereus
taacattttgaactgcatgg

SEQ ID NO: 41702 - DNA, 20 bp, Bacillus schlegellii
ggaagccttcgggcggaagc

SEQ ID NO: 41703 - DNA, 20 bp, Gemella bergeri
ggctttgcggagcattagct

SEQ ID NO: 41704 - DNA, 20 bp, Eggerthella lenta
aactgggaggctcgagttcg

SEQ ID NO: 41705 - DNA, 20 bp, Bacteroides merdae
atcgctgatagataggcatg

SEQ ID NO: 41706 - DNA, 20 bp, Pseudoramibacter alactolyticus
tcgaaggtggggctagtaat

SEQ ID NO: 41707 - DNA, 20 bp, Bacteroides fragilis
acatgtcagtgagcaatcac

SEQ ID NO: 41708 - DNA, 20 bp, Brevibacillus laterosporus
ggctcaacctcggttcgcat

SEQ ID NO: 41709 - DNA, 20 bp, Acinetobacter junii
ctactgagactaatactctt

SEQ ID NO: 41710 - DNA, 20 bp, Peptoniphilus indolicus
caatggtcggaacaaagagc

SEQ ID NO: 41711 - DNA, 20 bp, Paenibacillus peoriae
tttagaagcttgcttctaaa

SEQ ID NO: 41712 - DNA, 20 bp, Microbacterium hominis
gggactctttggacactggt

SEQ ID NO: 41713 - DNA, 20 bp, Anaerococcus prevotii
cgggattaataccaaatgaa

SEQ ID NO: 41714 - DNA, 20 bp, Bacteroides thetaiotaomicron
ggcttaaattgcatttgaat

SEQ ID NO: 41715 - DNA, 20 bp, Acinetobacter junii
ggctactgagactaatactc

SEQ ID NO: 41716 - DNA, 20 bp, Tetragenococcus halophilus
gcaagtcgaacgctgcttaa

SEQ ID NO: 41717 - DNA, 20 bp, Pasteurella aerogenes
ggccggttgccataagatga

SEQ ID NO: 41718 - DNA, 20 bp, Peptoniphilus indolicus
atggtcggaacaaagagcgg

SEQ ID NO: 41719 - DNA, 20 bp, Neisseria lactamica
tgggcagcctgactgcttgg

SEQ ID NO: 41720 - DNA, 20 bp, Rhizobium radiobacter
tcggggtttgggcagtggag

SEQ ID NO: 41721 - DNA, 20 bp, Helcococcus kunzii
tcggagacttgtatacaggt

SEQ ID NO: 41722 - DNA, 20 bp, Actinomyces bovis
gcggtttatcaagtttatgg

SEQ ID NO: 41723 - DNA, 20 bp, Corynebacterium glucuronolyticum
gtgagattgggctagagata

SEQ ID NO: 41724 - DNA, 20 bp, Moraxella osloensis
tgagcctaaatcagattagc

SEQ ID NO: 41725 - DNA, 20 bp, Rhodococcus equi
gttttcccttgtggtttgta

SEQ ID NO: 41726 - DNA, 20 bp, Propionibacterium freudenreichii
gaagcgttcagagatgggcg

SEQ ID NO: 41727 - DNA, 20 bp, Neisseria meningitidis
tcagccgctgatattagcaa

SEQ ID NO: 41728 - DNA, 20 bp, Gemella haemolysans
aggaacaaagagaagcgagc

SEQ ID NO: 41729 - DNA, 20 bp, Gemella haemolysans
tttctggtgcttgcaccgga

SEQ ID NO: 41730 - DNA, 20 bp, Yersinia frederiksenii
catgacctcgaaagagcaaa

SEQ ID NO: 41731 - DNA, 20 bp, Lactococcus raffinolactis
cgtgctattcctagagatag

SEQ ID NO: 41732 - DNA, 20 bp, Prevotella corporis
ctgtctgttcgctcgacttg

SEQ ID NO: 41733 - DNA, 20 bp, Bacillus circulans
tcctctcatgaggaaaagct

SEQ ID NO: 41734 - DNA, 20 bp, Tissierella praeacuta
aaggcttgagttaaggagag

SEQ ID NO: 41735 - DNA, 20 bp, Vibrio cholerae
gtatcgctgccctctgtata

SEQ ID NO: 41736 - DNA, 20 bp, Bacteroides uniformis
atgctggggactctgtcgag

SEQ ID NO: 41737 - DNA, 20 bp, Granulicatella adiacens
gaggtaaccatttggagcca

SEQ ID NO: 41738 - DNA, 20 bp, Citrobacter sedlakii
gggaggaagggattgtggtt

SEQ ID NO: 41739 - DNA, 20 bp, Corynebacterium falsenii
tagtttcccttgtggtctgt

SEQ ID NO: 41740 - DNA, 20 bp, Brevibacillus choshinensis
tctttcagaccgcatggtct

SEQ ID NO: 41741 - DNA, 20 bp, Corynebacterium pilosum
cgtctgtggaagtccggggc

SEQ ID NO: 41742 - DNA, 20 bp, Bacteroides thetaiotaomicron
tgcaactgacactgatgctc

SEQ ID NO: 41743 - DNA, 20 bp, Streptococcus agalactiae
ataagagtaattaacacatg

SEQ ID NO: 41744 - DNA, 20 bp, Veillonella parvula
gcgcaggcggatcagtcagt

SEQ ID NO: 41745 - DNA, 20 bp, Corynebacterium xerosis
gtaaactcctttcaccatcg

SEQ ID NO: 41746 - DNA, 20 bp, Streptococcus constellatus
ttactacaccgtattctgtg

SEQ ID NO: 41747 - DNA, 20 bp, Anaerococcus prevotii
agtggaatttttagtgtagc

SEQ ID NO: 41748 - DNA, 20 bp, Leuconostoc citreum
gaagaaatgctaaaataggg

SEQ ID NO: 41749 - DNA, 20 bp, Bacteroides thetaiotaomicron
taaagttttccacgtgtgga

SEQ ID NO: 41750 - DNA, 20 bp, Leuconostoc lactis
tgatcaggtagtgacggtat

SEQ ID NO: 41751 - DNA, 20 bp, Atopobium parvulum
aggtcgggagttaaatccgg

SEQ ID NO: 41752 - DNA, 20 bp, Alicyclobacillus acidocaldarius
gccatcccatggttgagcca

SEQ ID NO: 41753 - DNA, 20 bp, Helcococcus kunzii
tatgtaggcggttaattaag

SEQ ID NO: 41754 - DNA, 20 bp, Anaerococcus prevotii
gggattaataccaaatgaaa

SEQ ID NO: 41755 - DNA, 20 bp, Campylobacter lari
aagagagcttgctcttttaa

SEQ ID NO: 41756 - DNA, 20 bp, Tetragenococcus halophilus
ggcctagcgaatctctgaaa

SEQ ID NO: 41757 - DNA, 20 bp, Neisseria meningitidis
ccctctgacacactcgagtc

SEQ ID NO: 41758 - DNA, 20 bp, Pasteurella aerogenes
aggccggttgccataagatg

SEQ ID NO: 41759 - DNA, 20 bp, Neisseria subflava
gttctgaactgggtgactcg

SEQ ID NO: 41760 - DNA, 20 bp, Alicyclobacillus acidocaldarius
ccatcccatggttgagccat

SEQ ID NO: 41761 - DNA, 20 bp, Acinetobacter junii
gcttgcaccttatcttagcg

SEQ ID NO: 41762 - DNA, 20 bp, Paenibacillus azotofixans
aagggatgggcctgcggcgc

SEQ ID NO: 41763 - DNA, 20 bp, Staphylococcus succinus
ccttgtacgacttcacccca

SEQ ID NO: 41764 - DNA, 20 bp, Clostridium paraputrificum
aagggaggaagccacctaag

SEQ ID NO: 41765 - DNA, 20 bp, Enterococcus dispar
cgcttttgcgtcacttgagg

SEQ ID NO: 41766 - DNA, 20 bp, Prevotella loescheii
ttagccagacggcggggtaa

SEQ ID NO: 41767 - DNA, 20 bp, Eggerthella lenta
ccctcctggggggcccggga

SEQ ID NO: 41768 - DNA, 20 bp, Enterococcus dispar
tttgcgtcacttgaggatgg

SEQ ID NO: 41769 - DNA, 20 bp, Leuconostoc lactis
gcatggtgtagggttgaaag

SEQ ID NO: 41770 - DNA, 20 bp, Prevotella oris
ggtgatgctgggcactctgt

SEQ ID NO: 41771 - DNA, 20 bp, Corynebacterium glucuronolyticum
taagtgatctgccctgcact

SEQ ID NO: 41772 - DNA, 20 bp, Leuconostoc lactis
ctaacaccgcatggtgtagg

SEQ ID NO: 41773 - DNA, 20 bp, Pasteurella trehalosi
gtgatgaggaaggtgttttg

SEQ ID NO: 41774 - DNA, 20 bp, Sphingobacterium multivorum
agagatgggctcgcgtgaca

SEQ ID NO: 41775 - DNA, 20 bp, Anaerococcus prevotii
gagtaacctgccttagacat

SEQ ID NO: 41776 - DNA, 20 bp, Streptococcus infantarius
gatgctattcctagagatag

SEQ ID NO: 41777 - DNA, 20 bp, Prevotella intermedia
tgcttgcacattctggacgt

SEQ ID NO: 41778 - DNA, 20 bp, Chromobacterium violaceum
gggaggaaatcccgctggtt

SEQ ID NO: 41779 - DNA, 20 bp, Veillonella atypica
gaaggaggggattgcgtctg

SEQ ID NO: 41780 - DNA, 20 bp, Listeria innocua
gtgtggcgcatgccacgctc

SEQ ID NO: 41781 - DNA, 20 bp, Sphingobacterium multivorum
tcactaagctggtattgacg

SEQ ID NO: 41782 - DNA, 20 bp, Streptococcus infantarius
aaactttagcttgctaaagt

SEQ ID NO: 41783 - DNA, 20 bp, Streptococcus porcinus
gataggctttctcttcggag

SEQ ID NO: 41784 - DNA, 20 bp, Lactococcus lactis
agagtggaaagctcatcaag

SEQ ID NO: 41785 - DNA, 20 bp, Neisseria subflava
aaaaggctgttgctaacatc

SEQ ID NO: 41786 - DNA, 20 bp, Brevibacillus choshinensis
agctctcttcggagcagcgg

SEQ ID NO: 41787 - DNA, 20 bp, Eggerthella lenta
ccagggcttgacatggacgt

SEQ ID NO: 41788 - DNA, 20 bp, Alcaligenes faecalis
cttgctctcttggcggcgag

SEQ ID NO: 41789 - DNA, 20 bp, Aerococcus christensenii
acgtaaggaacctaccgata

SEQ ID NO: 41790 - DNA, 20 bp, Bacteroides capilosus
gggcgtgtaggcgggactgc

SEQ ID NO: 41791 - DNA, 20 bp, Propionibacterium freudenreichii
ggtggtaatcccgaatatga

SEQ ID NO: 41792 - DNA, 20 bp, Aerococcus viridans
aatctacctataagcggggg

SEQ ID NO: 41793 - DNA, 20 bp, Porphyromonas endodontalis
gtggtgaaaagctgcagctc

SEQ ID NO: 41794 - DNA, 20 bp, Neisseria polysaccharea
agtgggtaggataaccgcaa

SEQ ID NO: 41795 - DNA, 20 bp, Neisseria subflava
aactgggtgactcgagtgtg

SEQ ID NO: 41796 - DNA, 20 bp, Serratia marcescens
gtggtgagcttaatacgttc

SEQ ID NO: 41797 - DNA, 20 bp, Geobacillus thermoglucosidasius
tgcttccgcttggttagcgg

SEQ ID NO: 41798 - DNA, 20 bp, Leuconostoc citreum
tgggaagaaatgctaaaata

SEQ ID NO: 41799 - DNA, 20 bp, Actinomyces bovis
tgccatagaaactggtagac

SEQ ID NO: 41800 - DNA, 20 bp, Porphyromonas endodontalis
agatttattgattacagatg

SEQ ID NO: 41801 - DNA, 20 bp, Bacillus sp
ccaagcaaatcccacaaaac

SEQ ID NO: 41802 - DNA, 20 bp, Bacteroides uniformis
gagacatgtcagccgcaagg

SEQ ID NO: 41803 - DNA, 20 bp, Anaerococcus tetradius
tttctggccataaactgacg

SEQ ID NO: 41804 - DNA, 20 bp, Actinomyces naeslundii
ccgcatgaaagtgtggctaa

SEQ ID NO: 41805 - DNA, 20 bp, Atopobium parvulum
cgattgcacccgaagtcgtc

SEQ ID NO: 41806 - DNA, 20 bp, Neisseria flavescens
atatcgacagctgatgacgg

SEQ ID NO: 41807 - DNA, 20 bp, Staphylococcus carnosus
atggttctgcaatgaaagac

SEQ ID NO: 41808 - DNA, 20 bp, Leuconostoc lactis
taaaacctaacaccgcatgg

SEQ ID NO: 41809 - DNA, 20 bp, Paenibacillus glucanolyticus
tctgaatctgctagagatag

SEQ ID NO: 41810 - DNA, 20 bp, Bacteroides thetaiotaomicron
aaggcagctcactggactgc

SEQ ID NO: 41811 - DNA, 20 bp, Neisseria meningitidis
catcagccgctgatattagc

SEQ ID NO: 41812 - DNA, 20 bp, Arthrobacter globiformis
cgaacgatgatccggtgctt

SEQ ID NO: 41813 - DNA, 20 bp, Clostridium ramosum
agcttaacttcagtaagcca

SEQ ID NO: 41814 - DNA, 20 bp, Bacillus sp
atctctagggccgtcagagg

SEQ ID NO: 41815 - DNA, 20 bp, Bacteroides fragilis
ctgccctttactcggggata

SEQ ID NO: 41816 - DNA, 20 bp, Corynebacterium accolens
gagggtctttctacgacttt

SEQ ID NO: 41817 - DNA, 20 bp, Campylobacter rectus
gtagcttgctatttaatctt

SEQ ID NO: 41818 - DNA, 20 bp, Enterococcus cecorum
agtggaaagttcatcccttg

SEQ ID NO: 41819 - DNA, 20 bp, Leptotrichia buccalis
gcggccagacaagtctgggg

SEQ ID NO: 41820 - DNA, 20 bp, Bacillus sp
tagggccgtcagaggatgtc

SEQ ID NO: 41821 - DNA, 20 bp, Moraxella osloensis
atgtgatactggtggtgcta

SEQ ID NO: 41822 - DNA, 20 bp, Bacteroides stercoris
ccaaaccgacgatggatagg

SEQ ID NO: 41823 - DNA, 20 bp, Streptococcus dysgalactiae
atttaaaaggtgcaactgca

SEQ ID NO: 41824 - DNA, 20 bp, Bacillus cereus
tgagagcttgctctcaagaa

SEQ ID NO: 41825 - DNA, 20 bp, Haemophilus paraphrophilus
acgaggaaggttgttgtgtg

SEQ ID NO: 41826 - DNA, 20 bp, Staphylococcus piscifermentans
atgcggaaccgcatggttcc

SEQ ID NO: 41827 - DNA, 20 bp, Corynebacterium group F
ccagtgcttgcactggtact

SEQ ID NO: 41828 - DNA, 20 bp, Clostridium clostridiiforme
gatgaagttttcggatggaa

SEQ ID NO: 41829 - DNA, 20 bp, Anaerococcus prevotii
agtctttcccagttcggatt

SEQ ID NO: 41830 - DNA, 20 bp, Actinomyces viscosus
tggagacggggtttcctcct

SEQ ID NO: 41831 - DNA, 20 bp, Eggerthella lenta
gcgatgggtagccgggttga

SEQ ID NO: 41832 - DNA, 20 bp, Haemophilus paraphrophilus
acgaggaaggttgttgtgtt

SEQ ID NO: 41833 - DNA, 20 bp, Campylobacter lari
agttgctaacacttcgggtg

SEQ ID NO: 41834 - DNA, 20 bp, Streptococcus intermedius
gatgtttaaaaggtgcaaat

SEQ ID NO: 41835 - DNA, 20 bp, Staphylococcus pulvereri
ggtggagtaaccttttatta

SEQ ID NO: 41836 - DNA, 20 bp, Streptococcus agalactiae
ggtttggtgtttacactaga

SEQ ID NO: 41837 - DNA, 20 bp, Clostridium clostridiiforme
gatgaagttttcggatggat

SEQ ID NO: 41838 - DNA, 20 bp, Rothia mucilaginosa
aacctacctttaactctggg

SEQ ID NO: 41839 - DNA, 20 bp, Pseudoramibacter alactolyticus
tgatccttcgggtgaaatta

SEQ ID NO: 41840 - DNA, 20 bp, Acinetobacter lwoffii
agcttgctacttgacctagc

SEQ ID NO: 41841 - DNA, 20 bp, Bacillus lentus
tctctccaggcggaaagata

SEQ ID NO: 41842 - DNA, 20 bp, Cardiobacterium hominis
tacagacggtagcgaagccg

SEQ ID NO: 41843 - DNA, 20 bp, Campylobacter rectus
gttgttgcttcgctagtcga

SEQ ID NO: 41844 - DNA, 20 bp, Bacteroides fragilis
ctgtcagtcttgagtacagt

SEQ ID NO: 41845 - DNA, 20 bp, Eikenella corrodens
tctgaactggatagctagag

SEQ ID NO: 41846 - DNA, 20 bp, Bacteroides thetaiotaomicron
ctgcaactgacactgatgct

SEQ ID NO: 41847 - DNA, 20 bp, Comamonas testosteroni
gggaactgccattgtgactg

SEQ ID NO: 41848 - DNA, 20 bp, Gordonia bronchialis
gggcctaacccccttgtggg

SEQ ID NO: 41849 - DNA, 20 bp, Actinomyces neuii
tctggattgggatgggctcg

SEQ ID NO: 41850 - DNA, 20 bp, Arcanobacterium bernardiae
ctttttggttgagggtatgt

SEQ ID NO: 41851 - DNA, 20 bp, Bacillus subtilis
gcatggttcagacataaaag

SEQ ID NO: 41852 - DNA, 20 bp, Porphyromonas endodontalis
tatcacacagaacgccgatt

SEQ ID NO: 41853 - DNA, 20 bp, Clostridium clostridiiforme
tgtttgacttgagtgcagga

SEQ ID NO: 41854 - DNA, 20 bp, Campylobacter sputorum
gtgctagtcatggcagtaat

SEQ ID NO: 41855 - DNA, 20 bp, Bacteroides stercoris
acagttgtgaaggtgctgca

SEQ ID NO: 41856 - DNA, 20 bp, Bacteroides fragilis
tacagaaggcagctagcggg

SEQ ID NO: 41857 - DNA, 20 bp, Bacillus oleronius
gagaattgaaagatggcttc

SEQ ID NO: 41858 - DNA, 20 bp, Campylobacter rectus
tgtatactagttgttgcttc

SEQ ID NO: 41859 - DNA, 20 bp, Staphylococcus pulvereri
ggagtaaccttttattagga

SEQ ID NO: 41860 - DNA, 20 bp, Pasteurella trehalosi
ttttgtttaatagacaaagc

SEQ ID NO: 41861 - DNA, 20 bp, Actinomyces naeslundii
tcctttgtgggggctggttc

SEQ ID NO: 41862 - DNA, 20 bp, Neisseria polysaccharea
accgcatacgtcttgagagg

SEQ ID NO: 41863 - DNA, 20 bp, Staphylococcus capitis
acagctgtttagtgtcagtt

SEQ ID NO: 41864 - DNA, 20 bp, Bacteroides forsythus
gtttgtcgcttaacgataaa

SEQ ID NO: 41865 - DNA, 20 bp, Corynebacterium glucuronolyticum
ctaatcgcgaaagccagtct

SEQ ID NO: 41866 - DNA, 20 bp, Propionibacterium freudenreichii
tgggcgtgcctttttggctg

SEQ ID NO: 41867 - DNA, 20 bp, Brevibacillus reuszeri
aaagaaaagatggcttcggc

SEQ ID NO: 41868 - DNA, 20 bp, Streptococcus hyovaginalis
cccttcggggcactggtgac

SEQ ID NO: 41869 - DNA, 20 bp, Clostridium cadaveris
gacttgacatgtcctgaatt

SEQ ID NO: 41870 - DNA, 20 bp, Alcaligenes faecalis
tttggcagagaagaaaaggt

SEQ ID NO: 41871 - DNA, 20 bp, Anaerococcus tetradius
gaagaataataccctataaa

SEQ ID NO: 41872 - DNA, 20 bp, Bacteroides fragilis
aaagtgcagtatgtatactg

SEQ ID NO: 41873 - DNA, 20 bp, Neisseria weaveri
gaaaaggttgtggctaatat

SEQ ID NO: 41874 - DNA, 20 bp, Brevibacillus choshinensis
tcaaccgtggagggccactt

SEQ ID NO: 41875 - DNA, 20 bp, Streptococcus anginosus
agtgtgagaatggaaagttc

SEQ ID NO: 41876 - DNA, 20 bp, Bacteroides fragilis
tattatatgaataaggatcg

SEQ ID NO: 41877 - DNA, 20 bp, Cardiobacterium hominis
taacttaggagggcgcttgc

SEQ ID NO: 41878 - DNA, 20 bp, Serratia proteamaculans
aagggtagtgtgttaatagc

SEQ ID NO: 41879 - DNA, 20 bp, Acinetobacter lwoffii
gattaatactcttggatagt

SEQ ID NO: 41880 - DNA, 20 bp, Propionibacterium freudenreichii
ggtcccttccacggggtccg

SEQ ID NO: 41881 - DNA, 20 bp, Anaerococcus tetradius
ttggaataatctgggagccg

SEQ ID NO: 41882 - DNA, 20 bp, Eremococcus coleocola
cgtaaagcactgttattagc

SEQ ID NO: 41883 - DNA, 20 bp, Leuconostoc citreum
aagaaatgctaaaataggga

SEQ ID NO: 41884 - DNA, 20 bp, Cardiobacterium hominis
actagagtatgaaagaggaa

SEQ ID NO: 41885 - DNA, 20 bp, Pseudoramibacter alactolyticus
attagaactggaaagtggcg

SEQ ID NO: 41886 - DNA, 20 bp, Moraxella bovis
agtcgaacgatgactatcta

SEQ ID NO: 41887 - DNA, 20 bp, Neisseria polysaccharea
accgcaaggggtccgcttac

SEQ ID NO: 41888 - DNA, 20 bp, Corynebacterium glucuronolyticum
ggctggtacagtgcgtgtgc

SEQ ID NO: 41889 - DNA, 20 bp, Actinomyces bovis
cggtttatcaagtttatggt

SEQ ID NO: 41890 - DNA, 20 bp, Helcococcus ovis
tggaatctaactgacgctga

SEQ ID NO: 41891 - DNA, 20 bp, Pediococcus dextrinicus
tctctaaaagctagtctcag

SEQ ID NO: 41892 - DNA, 20 bp, Acinetobacter calcoaceticus
aagttaataccttcagatag

SEQ ID NO: 41893 - DNA, 20 bp, Streptococcus constellatus
aaggtgcaagagcatcacta

SEQ ID NO: 41894 - DNA, 20 bp, Arcanobacterium bernardiae
cttgacatacactgcgatgt

SEQ ID NO: 41895 - DNA, 20 bp, Helcococcus ovis
gggtacgtaggcggtaattt

SEQ ID NO: 41896 - DNA, 20 bp, Bordetella bronchiseptica
gggctaatatcctgtgcaac

SEQ ID NO: 41897 - DNA, 20 bp, Bacteroides fragilis
acagaaggcagctagcgggt

SEQ ID NO: 41898 - DNA, 20 bp, Corynebacterium auris
gcctcttccacggggttcgt

SEQ ID NO: 41899 - DNA, 20 bp, Leptotrichia buccalis
tgcggctcaaccgcaagcct

SEQ ID NO: 41900 - DNA, 20 bp, Actinomyces neuii
cctttcgcctgcggaaaagg

SEQ ID NO: 41901 - DNA, 20 bp, Leuconostoc lactis
gatagtaactgatcaggtag

SEQ ID NO: 41902 - DNA, 20 bp, Streptococcus pyogenes
tggaaaatccaccaagtgac

SEQ ID NO: 41903 - DNA, 20 bp, Corynebacterium glucuronolyticum
catcgtggttggtgtggtgg

SEQ ID NO: 41904 - DNA, 20 bp, Actinomyces odontolyticus
tgggataacgcccggaaacg

SEQ ID NO: 41905 - DNA, 20 bp, Prevotella intermedia
gaaacggcattatgtgcttg

SEQ ID NO: 41906 - DNA, 20 bp, Neisseria elongata
cgggtaatgggggataacca

SEQ ID NO: 41907 - DNA, 20 bp, Bacillus pallidus
tagctgtcactgcaggatgg

SEQ ID NO: 41908 - DNA, 20 bp, Campylobacter curvus
ctcgctatgggatgaggcta

SEQ ID NO: 41909 - DNA, 20 bp, Oligella urethralis
gtcttacgatccccctcttt

SEQ ID NO: 41910 - DNA, 20 bp, Actinomyces turicensis
taatactggatattcactca

SEQ ID NO: 41911 - DNA, 20 bp, Veillonella dispar
aaggattgacggtaccggaa

SEQ ID NO: 41912 - DNA, 20 bp, Methylobacterium mesophilicum
aatgccagctgttggggtgc

SEQ ID NO: 41913 - DNA, 20 bp, Dermacoccus nishinomiyaensis
atacgaccgatctccgcatg

SEQ ID NO: 41914 - DNA, 20 bp, Prevotella corporis
acggatggggatgcgtccga

SEQ ID NO: 41915 - DNA, 20 bp, Gemella haemolysans
ggacacaagagattgtgttg

SEQ ID NO: 41916 - DNA, 20 bp, Weeksella virosa
gttagcgcctgatccagcca

SEQ ID NO: 41917 - DNA, 20 bp, Gemella haemolysans
tgttagggaagaatgattgt

SEQ ID NO: 41918 - DNA, 20 bp, Streptococcus sp.
aataccgcataaaattgatt

SEQ ID NO: 41919 - DNA, 20 bp, Alcaligenes faecalis
aagcgtgtgtaggcggttcg

SEQ ID NO: 41920 - DNA, 20 bp, Alicyclobacillus acidocaldarius
agccatcccatggttgagcc

SEQ ID NO: 41921 - DNA, 20 bp, Brevibacillus choshinensis
aacaacgggcagccaactcg

SEQ ID NO: 41922 - DNA, 20 bp, Brevundimonas diminuta
ctggaccgccacggagacgt

SEQ ID NO: 41923 - DNA, 20 bp, Leuconostoc argentinum
ttgagtgttgtagaggtaag

SEQ ID NO: 41924 - DNA, 20 bp, Prevotella disiens
taatctttaaagccggtccc

SEQ ID NO: 41925 - DNA, 20 bp, Streptococcus pyogenes
aagtagaacgctgagaactg

SEQ ID NO: 41926 - DNA, 20 bp, Fusobacterium nucleatum
tgagacagagatgtttcagt

SEQ ID NO: 41927 - DNA, 20 bp, Bacteroides thetaiotaomicron
agccgtaaggcaaatgtgaa

SEQ ID NO: 41928 - DNA, 20 bp, Clostridium ramosum
aaggcgacgatctggcctgc

SEQ ID NO: 41929 - DNA, 20 bp, Neisseria lactamica
cttgcgctatccgagcggcc

SEQ ID NO: 41930 - DNA, 20 bp, Moraxella bovis
cttgctagatatgattagtg

SEQ ID NO: 41931 - DNA, 20 bp, Microbacterium terregens
cggtgaaagagagcttgctc

SEQ ID NO: 41932 - DNA, 20 bp, Finegoldia magna
cccgtaaagcattggaaact

SEQ ID NO: 41933 - DNA, 20 bp, Peptostreptococcus anaerobius
catactgaaaagtttactaa

SEQ ID NO: 41934 - DNA, 20 bp, Leptotrichia buccalis
aatctttaaagccggtccaa

SEQ ID NO: 41935 - DNA, 20 bp, Eggerthella lenta
aagaaattcgacggtacctg

SEQ ID NO: 41936 - DNA, 20 bp, Bacteroides merdae
atctccaaaccatgtctcag

SEQ ID NO: 41937 - DNA, 20 bp, Brevibacillus choshinensis
gggactccaatcctcagtgc

SEQ ID NO: 41938 - DNA, 20 bp, Methylobacterium mesophilicum
gagagatttggggtccactt

SEQ ID NO: 41939 - DNA, 20 bp, Facklamia languida
ggctgtcacttaaggatggc

SEQ ID NO: 41940 - DNA, 20 bp, Oligella urethralis
gtcagcatcttaaggtatta

SEQ ID NO: 41941 - DNA, 20 bp, Alicyclobacillus acidocaldarius
tctgagggtgtcagagggat

SEQ ID NO: 41942 - DNA, 20 bp, Bacteroides thetaiotaomicron
gactacgatggataggggtt

SEQ ID NO: 41943 - DNA, 20 bp, Burkholderia gladioli
tccgcatacgatccacggat

SEQ ID NO: 41944 - DNA, 20 bp, Arcanobacterium bernardiae
aactcctttcagtacagaac

SEQ ID NO: 41945 - DNA, 20 bp, Gemella bergeri
ccaatctcataaaactattc

SEQ ID NO: 41946 - DNA, 20 bp, Streptococcus thoraltensis
ctggtgacagtaagctaatc

SEQ ID NO: 41947 - DNA, 20 bp, Streptococcus agalactiae
acatgttagttatttaaaag

SEQ ID NO: 41948 - DNA, 20 bp, Anaerococcus tetradius
atcttgaggtatggaaggga

SEQ ID NO: 41949 - DNA, 20 bp, Corynebacterium argentoratense
taagcttgcttgggtactcg

SEQ ID NO: 41950 - DNA, 20 bp, Corynebacterium group ANF
ccccaacttgggtataagcc

SEQ ID NO: 41951 - DNA, 20 bp, Propionibacterium propionicus
gacggtagcagtagaagaag

SEQ ID NO: 41952 - DNA, 20 bp, Campylobacter rectus
tcgctagtcgaggcagtaat

SEQ ID NO: 41953 - DNA, 20 bp, Rothia mucilaginosa
ctgtgaaaggccggggctta

SEQ ID NO: 41954 - DNA, 20 bp, Prevotella melaninogenica
gagattaagtgtgttgtgaa

SEQ ID NO: 41955 - DNA, 20 bp, Tetragenococcus halophilus
gcgctttacagcgtcactga

SEQ ID NO: 41956 - DNA, 20 bp, Peptoniphilus indolicus
gcggtcaaagatggactcgc

SEQ ID NO: 41957 - DNA, 20 bp, Eggerthella lenta
ggctccgccctccgtgccgc

SEQ ID NO: 41958 - DNA, 20 bp, Clostridium septicum
aggtgtgggaggtatcaact

SEQ ID NO: 41959 - DNA, 20 bp, Actinomyces turicensis
tgcagagatgtggtggcatt

SEQ ID NO: 41960 - DNA, 20 bp, Gemella morbillorum
agcttaaaaggtgcaattgc

SEQ ID NO: 41961 - DNA, 20 bp, Corynebacterium falsenii
aagaagccacttgtggtgac

SEQ ID NO: 41962 - DNA, 20 bp, Anaerobiospirillum succiniciproducens
ggcccttacggcagggctac

SEQ ID NO: 41963 - DNA, 20 bp, Paenibacillus azotofixans
gactttagttgccagcaggt

SEQ ID NO: 41964 - DNA, 20 bp, Streptococcus constellatus
ggtagatgtttaaaaggtgc

SEQ ID NO: 41965 - DNA, 20 bp, Comamonas testosteroni
cttgtgctactagagcggct

SEQ ID NO: 41966 - DNA, 20 bp, Haemophilus segnis
aggccgcatgccataggatg

SEQ ID NO: 41967 - DNA, 20 bp, Actinomyces bovis
aagagggaatgcttcttata

SEQ ID NO: 41968 - DNA, 20 bp, Brochothrix campestris
tgtgctgaacatcataagat

SEQ ID NO: 41969 - DNA, 20 bp, Prevotella loescheii
gtgaccaagcgaaagcgtta

SEQ ID NO: 41970 - DNA, 20 bp, Alicyclobacillus acidocaldarius
cgtctcgcatggggctttcc

SEQ ID NO: 41971 - DNA, 20 bp, Acinetobacter johnsonii
ggtagcttgctacctaacct

SEQ ID NO: 41972 - DNA, 20 bp, Fusobacterium nucleatum
caacatttagaaatgaatgc

SEQ ID NO: 41973 - DNA, 20 bp, Alcaligenes faecalis
gataatactgacgctcagac

SEQ ID NO: 41974 - DNA, 20 bp, Prevotella oris
ggtgaccaagcgaaagcatt

SEQ ID NO: 41975 - DNA, 20 bp, Helcococcus ovis
ttggcaatacccgaagccgt

SEQ ID NO: 41976 - DNA, 20 bp, Morganella morganii
ttgattgagtcagatgtgaa

SEQ ID NO: 41977 - DNA, 20 bp, Actinomyces naeslundii
accgcatgaaagtgtggcta

SEQ ID NO: 41978 - DNA, 20 bp, Anaerococcus tetradius
gggttgtaaaaatctttttt

SEQ ID NO: 41979 - DNA, 20 bp, Finegoldia magna
agtggagaggaaagtggaat

SEQ ID NO: 41980 - DNA, 20 bp, Oligella ureolytica
caacgaagaaaagtcttagg

SEQ ID NO: 41981 - DNA, 20 bp, Prevotella intermedia
agcgcctggcgttagcggct

SEQ ID NO: 41982 - DNA, 20 bp, Bacteroides fragilis
gtaggtggactggtaagtca

SEQ ID NO: 41983 - DNA, 20 bp, Bacillus lentus
ctccaggcggaaagataatc

SEQ ID NO: 41984 - DNA, 20 bp, Leuconostoc lactis
gttggagaagaatgtatctg

SEQ ID NO: 41985 - DNA, 20 bp, Paenibacillus lautus
taggagagtgacggtacttg

SEQ ID NO: 41986 - DNA, 20 bp, Brochothrix campestris
caaagccggtttggtaacct

SEQ ID NO: 41987 - DNA, 20 bp, Paenibacillus validus
gaaacacggggcaacctgtg

SEQ ID NO: 41988 - DNA, 20 bp, Facklamia sourekii
ctacgggacaaggagacagg

SEQ ID NO: 41989 - DNA, 20 bp, Streptococcus agalactiae
tgtttacactagactgatga

SEQ ID NO: 41990 - DNA, 20 bp, Tissierella praeacuta
accttatgacacttaaatgt

SEQ ID NO: 41991 - DNA, 20 bp, Alicyclobacillus acidocaldarius
tattccggcctgaaaggcag

SEQ ID NO: 41992 - DNA, 20 bp, Staphylococcus carnosus
gcaagtcgagcgaacagaat

SEQ ID NO: 41993 - DNA, 20 bp, Paenibacillus amylolyticus
gccaaggctcaaccttggtt

SEQ ID NO: 41994 - DNA, 20 bp, Turicella otitidis
atttttagtgtgatggttgg

SEQ ID NO: 41995 - DNA, 20 bp, Porphyromonas endodontalis
gtaagacgcgaggaaggggc

SEQ ID NO: 41996 - DNA, 20 bp, Weeksella virosa
ggatcaataagtcagtggtg

SEQ ID NO: 41997 - DNA, 20 bp, Bacteroides ureolyticus
taaaatagctaccttccaca

SEQ ID NO: 41998 - DNA, 20 bp, Propionibacterium freudenreichii
gacttcggtatagctccagg

SEQ ID NO: 41999 - DNA, 20 bp, Alicyclobacillus acidocaldarius
actcggtaccgtctcgcatg

SEQ ID NO: 42000 - DNA, 20 bp, Empedobacter brevis
ggcggattaatcagtcagtg

SEQ ID NO: 42001 - DNA, 20 bp, Clostridium ramosum
caatggatggtgcagaggga

SEQ ID NO: 42002 - DNA, 20 bp, Abiotrophia defectiva
aagaacagcgcatagagtaa

SEQ ID NO: 42003 - DNA, 20 bp, Lactococcus lactis
gggagttgggagtacccgaa

SEQ ID NO: 42004 - DNA, 20 bp, Bacteroides forsythus
ggtgaaagtttgtcgcttaa

SEQ ID NO: 42005 - DNA, 20 bp, Streptococcus gordonii
agactgtgagttgcgaacgg

SEQ ID NO: 42006 - DNA, 20 bp, Eikenella corrodens
tgtccggcgagtggcgaacg

SEQ ID NO: 42007 - DNA, 20 bp, Streptococcus parasanguinis
gcataaaagtcgacattgca

SEQ ID NO: 42008 - DNA, 20 bp, Moraxella lacunata
gtctcttgaagacttagtga

SEQ ID NO: 42009 - DNA, 20 bp, Campylobacter concisus
gttttactggttttggatgg

SEQ ID NO: 42010 - DNA, 20 bp, Facklamia ignava
taccgtggctttgatgcata

SEQ ID NO: 42011 - DNA, 20 bp, Escherichia hermannii
ggtgacgacgtaacaaggta

SEQ ID NO: 42012 - DNA, 20 bp, Bacteroides fragilis
aatgggcgctagcctgaacc

SEQ ID NO: 42013 - DNA, 20 bp, Campylobacter sputorum
catggcagtaatccacctaa

SEQ ID NO: 42014 - DNA, 20 bp, Alcaligenes faecalis
gcagagaagaaaaggtacct

SEQ ID NO: 42015 - DNA, 20 bp, Propionibacterium acnes
ccttgttcactgttgccagc

SEQ ID NO: 42016 - DNA, 20 bp, Brevibacillus choshinensis
aaccgtggagggccacttga

SEQ ID NO: 42017 - DNA, 20 bp, Anaerococcus tetradius
taagcttttaaaactgctca

SEQ ID NO: 42018 - DNA, 20 bp, Leuconostoc lactis
tggagaagaatgtatctgat

SEQ ID NO: 42019 - DNA, 20 bp, Fusobacterium mortiferum
attgcgttggaaactgccaa

SEQ ID NO: 42020 - DNA, 20 bp, Cardiobacterium hominis
aggcagctttctgggtcgat

SEQ ID NO: 42021 - DNA, 20 bp, Campylobacter rectus
tctaacggcttaaccgttaa

SEQ ID NO: 42022 - DNA, 20 bp, Helcococcus kunzii
agcgcagctacctcgtgaga

SEQ ID NO: 42023 - DNA, 20 bp, Clostridium tetani
aggcggtttcctggactgta

SEQ ID NO: 42024 - DNA, 20 bp, Leuconostoc lactis
ttgttggagaagaatgtatc

SEQ ID NO: 42025 - DNA, 20 bp, Tetragenococcus halophilus
tatgacggtagctgaccaga

SEQ ID NO: 42026 - DNA, 20 bp, Veillonella atypica
gtcgaacgaagagcgatgga

SEQ ID NO: 42027 - DNA, 20 bp, Streptococcus parasanguinis
ttggtgcttgcaccgagcgg

SEQ ID NO: 42028 - DNA, 20 bp, Corynebacterium glucuronolyticum
ctggtgtgggatgagcttgc

SEQ ID NO: 42029 - DNA, 20 bp, Tetragenococcus halophilus
gtacaacgagcaagccaagc

SEQ ID NO: 42030 - DNA, 20 bp, Morganella morganii
taacccgggaattgcatctg

SEQ ID NO: 42031 - DNA, 20 bp, Staphylococcus aureus
agcaagcttctcgtccgttc

SEQ ID NO: 42032 - DNA, 20 bp, Brevundimonas vesicularis
gagtatgagagaggtgtgtg

SEQ ID NO: 42033 - DNA, 20 bp, Suttonella indologenes
agattggaaggaacaccgat

SEQ ID NO: 42034 - DNA, 20 bp, Bacteroides fragilis
ccgggcttaaattgcagtgg

SEQ ID NO: 42035 - DNA, 20 bp, Bacillus simplex
agtaccagagtaactgctgg

SEQ ID NO: 42036 - DNA, 20 bp, Anaerococcus tetradius
cacaaggggatagcctttgg

SEQ ID NO: 42037 - DNA, 20 bp, Pediococcus pentosaceus
tgagattttaacacgaagtg

SEQ ID NO: 42038 - DNA, 20 bp, Enterobacter gergoviae
aagggagtgaggttaataac

SEQ ID NO: 42039 - DNA, 20 bp, Leuconostoc argentinum
tagagatgggtccgcggtgc

SEQ ID NO: 42040 - DNA, 20 bp, Prevotella bivia
cctagtgttagcggctaagc

SEQ ID NO: 42041 - DNA, 20 bp, Bacteroides merdae
aaggatctatggtttgtaaa

SEQ ID NO: 42042 - DNA, 20 bp, Gemella haemolysans
actgtgaggacacaagagat

SEQ ID NO: 42043 - DNA, 20 bp, Bacteroides uniformis
cccttatcgatagttaccat

SEQ ID NO: 42044 - DNA, 20 bp, Moraxella  catarrhalis
gaaggcagctccctggcatc

SEQ ID NO: 42045 - DNA, 20 bp, Neisseria mucosa
taccgcatatcttctgagga

SEQ ID NO: 42046 - DNA, 20 bp, Gemella haemolysans
gacctttggttagacacaga

SEQ ID NO: 42047 - DNA, 20 bp, Pasteurella multocida
ggaagggatgttgttaaata

SEQ ID NO: 42048 - DNA, 20 bp, Bacillus lentus
caagcttcttattggttcgc

SEQ ID NO: 42049 - DNA, 20 bp, Prevotella oralis
ggtgatgtgcagcgcgaact

SEQ ID NO: 42050 - DNA, 20 bp, Corynebacterium ulcerans
ctaggtgtgagggtcttcca

SEQ ID NO: 42051 - DNA, 20 bp, Campylobacter curvus
cttggcagtaatgcacctaa

SEQ ID NO: 42052 - DNA, 20 bp, Anaerococcus tetradius
gatagttccttacttcttcg

SEQ ID NO: 42053 - DNA, 20 bp, Vibrio cholerae
ctgctttgctcttgcgaggt

SEQ ID NO: 42054 - DNA, 20 bp, Photobacterium damselae
cctgcattatttgacgttac

SEQ ID NO: 42055 - DNA, 20 bp, Pseudoramibacter alactolyticus
tcggagcgaatctcataaaa

SEQ ID NO: 42056 - DNA, 20 bp, Prevotella melaninogenica
atttagagataatgacgccc

SEQ ID NO: 42057 - DNA, 20 bp, Suttonella indologenes
gagattggaaggaacaccga

SEQ ID NO: 42058 - DNA, 20 bp, Prevotella melaninogenica
gataatgacgcccttcgggg

SEQ ID NO: 42059 - DNA, 20 bp, Sporosarcina pasteurii
tgctccagcactaaggggcg

SEQ ID NO: 42060 - DNA, 20 bp, Actinomyces bovis
ttgtaagggaagaacgatag

SEQ ID NO: 42061 - DNA, 20 bp, Veillonella atypica
gcttctatcaatcttagtgg

SEQ ID NO: 42062 - DNA, 20 bp, Campylobacter concisus
gaaagggttttactggtttt

SEQ ID NO: 42063 - DNA, 20 bp, Acinetobacter baumannii
agcttgctaccggacctagc

SEQ ID NO: 42064 - DNA, 20 bp, Pediococcus inopinatus
aaaccgcatggttttctttt

SEQ ID NO: 42065 - DNA, 20 bp, Streptococcus thermophilus
ataccgcataacaatggatg

SEQ ID NO: 42066 - DNA, 20 bp, Corynebacterium macginleyi
gccggtggcctaaacgtgtt

SEQ ID NO: 42067 - DNA, 20 bp, Dermabacter hominis
agctgtgcttgcacagtgga

SEQ ID NO: 42068 - DNA, 20 bp, Clostridium paraputrificum
acccgtaagggaggaagcca

SEQ ID NO: 42069 - DNA, 20 bp, Aneurinibacillus aneurinilyticus
gaaagagaaagacctttggt

SEQ ID NO: 42070 - DNA, 20 bp, Campylobacter rectus
aatctagagtaagggagagg

SEQ ID NO: 42071 - DNA, 20 bp, Listeria welshimeri
gctttgaaagatggtttcgg

SEQ ID NO: 42072 - DNA, 20 bp, Streptococcus porcinus
caccagtctaatgagttgcg

SEQ ID NO: 42073 - DNA, 20 bp, Staphylococcus sp.
atgcggttcgaaatattatc

SEQ ID NO: 42074 - DNA, 20 bp, Clostridium subterminale
acttataaaaccaatcccag

SEQ ID NO: 42075 - DNA, 20 bp, Streptococcus porcinus
cttgcaccagtctaatgagt

SEQ ID NO: 42076 - DNA, 20 bp, Facklamia ignava
aaagcactgttatcagagaa

SEQ ID NO: 42077 - DNA, 20 bp, Providencia alcalifaciens
aagttcccctgctttgctcc

SEQ ID NO: 42078 - DNA, 20 bp, Eggerthella lenta
gacatgaagtggcgaacggg

SEQ ID NO: 42079 - DNA, 20 bp, Neisseria subflava
ggaagaaaaggatagggtta

SEQ ID NO: 42080 - DNA, 20 bp, Bacillus lentus
ccagggcggtcaggagatgt

SEQ ID NO: 42081 - DNA, 20 bp, Bacteroides vulgatus
tgcgtaaccgcgaggagcgc

SEQ ID NO: 42082 - DNA, 20 bp, Lactococcus garvieae
gtctgatgtaaaaggcagtg

SEQ ID NO: 42083 - DNA, 20 bp, Acinetobacter junii
aggaggctactgagactaat

SEQ ID NO: 42084 - DNA, 20 bp, Pasteurella multocida
gggctatatgcttggtgccc

SEQ ID NO: 42085 - DNA, 20 bp, Moraxella osloensis
cactttaagcagggaggaga

SEQ ID NO: 42086 - DNA, 20 bp, Paenibacillus macerans
agtgcttgcactcctgagag

SEQ ID NO: 42087 - DNA, 20 bp, Paenibacillus macerans
gatagagcttttcttcggga

SEQ ID NO: 42088 - DNA, 20 bp, Moraxella  catarrhalis
caagtcgaacgaagttagga

SEQ ID NO: 42089 - DNA, 20 bp, Cardiobacterium hominis
gcttaacttaggagggcgct

SEQ ID NO: 42090 - DNA, 20 bp, Lactococcus garvieae
cttcctaaggtaagaccgat

SEQ ID NO: 42091 - DNA, 20 bp, Empedobacter brevis
tagctgaaggtaccagaaga

SEQ ID NO: 42092 - DNA, 20 bp, Helcococcus ovis
ttgacatatacagggatata

SEQ ID NO: 42093 - DNA, 20 bp, Bacteroides capilosus
tggggaataacagtccgaaa

SEQ ID NO: 42094 - DNA, 20 bp, Haemophilus paraphrophilus
gacgaggaaggttgttgtgt

SEQ ID NO: 42095 - DNA, 20 bp, Anaerococcus tetradius
gcaagttagaagtgaaatcc

SEQ ID NO: 42096 - DNA, 20 bp, Gemella haemolysans
acacagtagagacggtacct

SEQ ID NO: 42097 - DNA, 20 bp, Arcanobacterium haemolyticum
tattctgcttctgccgcatg

SEQ ID NO: 42098 - DNA, 20 bp, Paenibacillus glucanolyticus
acatccctctgaatctgcta

SEQ ID NO: 42099 - DNA, 20 bp, Rothia mucilaginosa
accaatctccgcatggggtg

SEQ ID NO: 42100 - DNA, 20 bp, Alcaligenes faecalis
cgaagagatttggccgtgct

SEQ ID NO: 42101 - DNA, 20 bp, Actinomyces neuii
ggtctaatactggatgttcc

SEQ ID NO: 42102 - DNA, 20 bp, Bacteroides capilosus
ccgaaggtgggttcgataat

SEQ ID NO: 42103 - DNA, 20 bp, Paenibacillus amylolyticus
ctaccggagtgacggtacct

SEQ ID NO: 42104 - DNA, 20 bp, Gemella bergeri
gaaagggaggagccggtcac

SEQ ID NO: 42105 - DNA, 20 bp, Achromobacter xylosoxidans
atgccgaagagatttggcag

SEQ ID NO: 42106 - DNA, 20 bp, Gemella haemolysans
tgacatactgtgaggacaca

SEQ ID NO: 42107 - DNA, 20 bp, Bacteroides ovatus
aatatattggaaacagtata

SEQ ID NO: 42108 - DNA, 20 bp, Haemophilus segnis
gcggctatttaagtgaggtg

SEQ ID NO: 42109 - DNA, 20 bp, Stenotrophomonas maltophilia
ccagctggctaatacccggt

SEQ ID NO: 42110 - DNA, 20 bp, Bacillus sp
acgcatgtggaacgagcggc

SEQ ID NO: 42111 - DNA, 20 bp, Haemophilus influenzae
taaccttttggagggcgttt

SEQ ID NO: 42112 - DNA, 20 bp, Pediococcus dextrinicus
tcttgacatctagcgccaat

SEQ ID NO: 42113 - DNA, 20 bp, Arcanobacterium bernardiae
gcctttttggttgagggtat

SEQ ID NO: 42114 - DNA, 20 bp, Leuconostoc pseudomesenteroides
gaatgaaacttagtgtcgca

SEQ ID NO: 42115 - DNA, 20 bp, Enterobacter gergoviae
gcggggaggaagggagtgag

SEQ ID NO: 42116 - DNA, 20 bp, Campylobacter rectus
aagtcgggaaagtttttcgg

SEQ ID NO: 42117 - DNA, 20 bp, Brevibacillus choshinensis
ctcctagagataggagctct

SEQ ID NO: 42118 - DNA, 20 bp, Ralstonia paucula
gcagcaggagcggccgatgt

SEQ ID NO: 42119 - DNA, 20 bp, Anaerococcus tetradius
gtgtctggaataatctgggt

SEQ ID NO: 42120 - DNA, 20 bp, Campylobacter concisus
gccagtggcctgtcaaaggg

SEQ ID NO: 42121 - DNA, 20 bp, Streptococcus constellatus
accgtagtttactacaccgt

SEQ ID NO: 42122 - DNA, 20 bp, Clostridium paraputrificum
accatgtaatgtgggaagtc

SEQ ID NO: 42123 - DNA, 20 bp, Anaerococcus tetradius
cagtaccatacgaataagga

SEQ ID NO: 42124 - DNA, 20 bp, Ralstonia paucula
ttgctctggctaatacctgg

SEQ ID NO: 42125 - DNA, 20 bp, Arcanobacterium bernardiae
agaacaaggcctttttggtt

SEQ ID NO: 42126 - DNA, 20 bp, Oligella urethralis
ctctcatgctgccgttcgac

SEQ ID NO: 42127 - DNA, 20 bp, Bacillus coagulans
aactctgttgccggggaaga

SEQ ID NO: 42128 - DNA, 20 bp, Acinetobacter baumannii
ggaaggtagcttgctaccgg

SEQ ID NO: 42129 - DNA, 20 bp, Oligella ureolytica
ataccttaagatgctgacgg

SEQ ID NO: 42130 - DNA, 20 bp, Anaerococcus prevotii
ttactgggctcattctgacg

SEQ ID NO: 42131 - DNA, 20 bp, Brevibacillus choshinensis
gtgttggggactccaatcct

SEQ ID NO: 42132 - DNA, 20 bp, Corynebacterium jeikeium
ttacgattcccgtgccgtag

SEQ ID NO: 42133 - DNA, 20 bp, Bacteroides uniformis
cttgagtacagtagaggcag

SEQ ID NO: 42134 - DNA, 20 bp, Leclercia adecarboxylata
gaggggcaagcgttaatcgg

SEQ ID NO: 42135 - DNA, 20 bp, Clostridium innocuum
gagtcagtaatacccgaagc

SEQ ID NO: 42136 - DNA, 20 bp, Pseudoramibacter alactolyticus
ctgtaagacttgagtactga

SEQ ID NO: 42137 - DNA, 20 bp, Anaerococcus prevotii
gaaaccgggattaataccaa

SEQ ID NO: 42138 - DNA, 20 bp, Leptotrichia buccalis
gatgctgcaggagagctttg

SEQ ID NO: 42139 - DNA, 20 bp, Actinomyces neuii
gacgtcgtgtgggggatgaa

SEQ ID NO: 42140 - DNA, 20 bp, Facklamia sourekii
gtgttaagtgttggggggct

SEQ ID NO: 42141 - DNA, 20 bp, Neisseria meningitidis
ctttcgggccttgcgctatt

SEQ ID NO: 42142 - DNA, 20 bp, Bacillus pallidus
gggtatccaccctttagtgc

SEQ ID NO: 42143 - DNA, 20 bp, Streptococcus parasanguinis
caaatgcatcactaagagat

SEQ ID NO: 42144 - DNA, 20 bp, Vibrio hollisae
atccgccagaagtgggtagg

SEQ ID NO: 42145 - DNA, 20 bp, Bacillus lentus
ggtaccggcatttcctccga

SEQ ID NO: 42146 - DNA, 20 bp, Comamonas terrigena
cgcatgagaactgaggttga

SEQ ID NO: 42147 - DNA, 20 bp, Brevibacterium epidermidis
ggaaacagttcttctctttg

SEQ ID NO: 42148 - DNA, 20 bp, Corynebacterium auris
ggtcggtacagcgcgtgtgc

SEQ ID NO: 42149 - DNA, 20 bp, Pasteurella multocida
ctatatgcttggtgcccgaa

SEQ ID NO: 42150 - DNA, 20 bp, Kingella kingae
aaggaaagcaggggatcttc

SEQ ID NO: 42151 - DNA, 20 bp, Anaerococcus tetradius
gcttttaaaactgttaggct

SEQ ID NO: 42152 - DNA, 20 bp, Actinomyces naeslundii
gggccttttccgggtcttcc

SEQ ID NO: 42153 - DNA, 20 bp, Bacteroides uniformis
caaggcagttgtgaaggtgc

SEQ ID NO: 42154 - DNA, 20 bp, Mannheimia haemolytica
aacaactagagtactttagg

SEQ ID NO: 42155 - DNA, 20 bp, Prevotella melaninogenica
gtgattgtttgcaggtacca

SEQ ID NO: 42156 - DNA, 20 bp, Paenibacillus pabuli
ctgaagagaactggaaagac

SEQ ID NO: 42157 - DNA, 20 bp, Paenibacillus pabuli
tatatttagttgccagcact

SEQ ID NO: 42158 - DNA, 20 bp, Bacillus pallidus
gaagggagcttgctccttta

SEQ ID NO: 42159 - DNA, 20 bp, Prevotella bivia
gcgtgttgtgaaatgtagga

SEQ ID NO: 42160 - DNA, 20 bp, Pseudoramibacter alactolyticus
cgaacgagaaggttttgaat

SEQ ID NO: 42161 - DNA, 20 bp, Proteus vulgaris
gaggaaggtgataaagttaa

SEQ ID NO: 42162 - DNA, 20 bp, Methylobacterium mesophilicum
gcagtagcgcagctaacgct

SEQ ID NO: 42163 - DNA, 20 bp, Streptococcus thermophilus
tcatttatttgaaaggggca

SEQ ID NO: 42164 - DNA, 20 bp, Moraxella lacunata
accgcatacgtcttacgaga

SEQ ID NO: 42165 - DNA, 20 bp, Bacteroides vulgatus
caaggcatctgtgaaggtgc

SEQ ID NO: 42166 - DNA, 20 bp, Methylobacterium mesophilicum
ttcggtggcgcgcacacagg

SEQ ID NO: 42167 - DNA, 20 bp, Anaerobiospirillum succiniciproducens
taccgtgaggtggagtggaa

SEQ ID NO: 42168 - DNA, 20 bp, Brochothrix campestris
ttggtaaccttcgggagcta

SEQ ID NO: 42169 - DNA, 20 bp, Veillonella dispar
agttagaaggattgacggta

SEQ ID NO: 42170 - DNA, 20 bp, Alicyclobacillus acidocaldarius
actccagacttgctcgaccg

SEQ ID NO: 42171 - DNA, 20 bp, Clostridium sordellii
aggcggtctttcaagccaga

SEQ ID NO: 42172 - DNA, 20 bp, Lactococcus lactis
ttaagtttgaaagatgcaat

SEQ ID NO: 42173 - DNA, 20 bp, Bacillus coagulans
gatagttttttcctccgcat

SEQ ID NO: 42174 - DNA, 20 bp, Weissella paramesenteroides
taataccgtataataccaac

SEQ ID NO: 42175 - DNA, 20 bp, Pediococcus inopinatus
tataaagtgagtggcgaacg

SEQ ID NO: 42176 - DNA, 20 bp, Bacteroides capilosus
aaaccacgggctcaacctgt

SEQ ID NO: 42177 - DNA, 20 bp, Brevibacillus choshinensis
ggaacaacgggcagccaact

SEQ ID NO: 42178 - DNA, 20 bp, Oligella ureolytica
gcagtgatctatagctggtt

SEQ ID NO: 42179 - DNA, 20 bp, Peptoniphilus indolicus
gggttcgcaggcggtttaga

SEQ ID NO: 42180 - DNA, 20 bp, Granulicatella elegans
acgagagcgaccggtgcttg

SEQ ID NO: 42181 - DNA, 20 bp, Bacillus circulans
ggaaaagctgaaagacggtt

SEQ ID NO: 42182 - DNA, 20 bp, Leuconostoc lactis
gttgttggagaagaatgtat

SEQ ID NO: 42183 - DNA, 20 bp, Anaerococcus prevotii
tgaggaccggtatagagata

SEQ ID NO: 42184 - DNA, 20 bp, Clostridium botulinum
caaagatttattgctttgag

SEQ ID NO: 42185 - DNA, 20 bp, Peptoniphilus indolicus
ttagcggtcaaagatggact

SEQ ID NO: 42186 - DNA, 20 bp, Neisseria meningitidis
cccctgctttctctctcaag

SEQ ID NO: 42187 - DNA, 20 bp, Paenibacillus amylolyticus
tgctaccggagtgacggtac

SEQ ID NO: 42188 - DNA, 20 bp, Streptococcus constellatus
agtctgaagtgaaaggcagt

SEQ ID NO: 42189 - DNA, 20 bp, Weissella paramesenteroides
tgctctgatttgattttatc

SEQ ID NO: 42190 - DNA, 20 bp, Campylobacter sputorum
acacttagaaatgagtgcta

SEQ ID NO: 42191 - DNA, 20 bp, Streptococcus constellatus
cgtagtttactaccccgtat

SEQ ID NO: 42192 - DNA, 20 bp, Staphylococcus succinus
gtcaagatgcgcacagttac

SEQ ID NO: 42193 - DNA, 20 bp, Bacteroides uniformis
tacagaaggcagctacacgg

SEQ ID NO: 42194 - DNA, 20 bp, Actinomyces bovis
tggggagtatgcgcgcaagc

SEQ ID NO: 42195 - DNA, 20 bp, Pasteurella multocida
gacctcttggccacctgcca

SEQ ID NO: 42196 - DNA, 20 bp, Streptococcus constellatus
gcaagagcatcactaccaga

SEQ ID NO: 42197 - DNA, 20 bp, Staphylococcus capitis
ggataggacagctgtttagt

SEQ ID NO: 42198 - DNA, 20 bp, Pseudoramibacter alactolyticus
tgtgagagaaccgcaaggac

SEQ ID NO: 42199 - DNA, 20 bp, Aerococcus viridans
gcgaacagatgaagtgcttg

SEQ ID NO: 42200 - DNA, 20 bp, Methylobacterium mesophilicum
ttgcacctcagtagcgcagc

SEQ ID NO: 42201 - DNA, 20 bp, Actinomyces bovis
gcaaaagcacagagatgtgt

SEQ ID NO: 42202 - DNA, 20 bp, Fusobacterium varium
ttgacatcccaagaagttaa

SEQ ID NO: 42203 - DNA, 20 bp, Actinomyces turicensis
ctcttctttgggataacggt

SEQ ID NO: 42204 - DNA, 20 bp, Arcanobacterium bernardiae
ggttggaaagggtttctgga

SEQ ID NO: 42205 - DNA, 20 bp, Alicyclobacillus acidocaldarius
aagatgcctcctcgcgggcg

SEQ ID NO: 42206 - DNA, 20 bp, Bacteroides capilosus
ctctgagatggcctcgcgtc

SEQ ID NO: 42207 - DNA, 20 bp, Aerococcus viridans
gcatggaagaagattgaaag

SEQ ID NO: 42208 - DNA, 20 bp, Alicyclobacillus acidocaldarius
cttgctcgaccgcctacgca

SEQ ID NO: 42209 - DNA, 20 bp, Streptococcus parauberis
gccgtggctcaaccatggtt

SEQ ID NO: 42210 - DNA, 20 bp, Clostridium clostridiiforme
cgcacagggccgcatggtct

SEQ ID NO: 42211 - DNA, 20 bp, Ralstonia paucula
cggaaagaaattgctctggc

SEQ ID NO: 42212 - DNA, 20 bp, Prevotella oris
cctgaagtctgtgaccgcaa

SEQ ID NO: 42213 - DNA, 20 bp, Streptococcus thermophilus
tgcgagtcggtgacggcgag

SEQ ID NO: 42214 - DNA, 20 bp, Prevotella bivia
tttagttgccatcaggttct

SEQ ID NO: 42215 - DNA, 20 bp, Bacteroides forsythus
cgggattgaaatgtagacga

SEQ ID NO: 42216 - DNA, 20 bp, Collinsella aerofaciens
ccaccccgcgagggggagcg

SEQ ID NO: 42217 - DNA, 20 bp, Gemella haemolysans
agagattgtgttgttctgac

SEQ ID NO: 42218 - DNA, 20 bp, Corynebacterium glucuronolyticum
tagagatagttcgtcccttg

SEQ ID NO: 42219 - DNA, 20 bp, Serratia proteamaculans
cagtgtgttaatagcacatt

SEQ ID NO: 42220 - DNA, 20 bp, Eggerthella lenta
aaaccgccctcgggcggaca

SEQ ID NO: 42221 - DNA, 20 bp, Lactococcus raffinolactis
tactcgtgctattcctagag

SEQ ID NO: 42222 - DNA, 20 bp, Abiotrophia defectiva
gagaagaacagcgcatagag

SEQ ID NO: 42223 - DNA, 20 bp, Bacillus sp
gtgacgcatgtggaacgagc

SEQ ID NO: 42224 - DNA, 20 bp, Campylobacter curvus
atactagttgttgctaagct

SEQ ID NO: 42225 - DNA, 20 bp, Kingella denitrificans
agggaagaaaagggaagtgt

SEQ ID NO: 42226 - DNA, 20 bp, Listeria ivanovii
ccaatgttagtggcggacgg

SEQ ID NO: 42227 - DNA, 20 bp, Bacteroides fragilis
cgcatggtttcattattaaa

SEQ ID NO: 42228 - DNA, 20 bp, Clostridium butyricum
cctcgcgagagtgagcaaaa

SEQ ID NO: 42229 - DNA, 20 bp, Propionibacterium avidum
ggctaataccggataggaat

SEQ ID NO: 42230 - DNA, 20 bp, Arthrobacter globiformis
atggaccggaccgccgcaga

SEQ ID NO: 42231 - DNA, 20 bp, Enterobacter cloacae
aggcgacagggttaataacc

SEQ ID NO: 42232 - DNA, 20 bp, Brevibacillus thermoruber
gcaagctaccacttgcggat

SEQ ID NO: 42233 - DNA, 20 bp, Streptococcus porcinus
gcatgaaagtagaagaccca

SEQ ID NO: 42234 - DNA, 20 bp, Brochothrix campestris
acctgcctcacagctgggga

SEQ ID NO: 42235 - DNA, 20 bp, Leuconostoc lactis
gattgataaacatttgagtg

SEQ ID NO: 42236 - DNA, 20 bp, Weeksella virosa
atgcgtaagattagatagtt

SEQ ID NO: 42237 - DNA, 20 bp, Moraxella osloensis
cttgacatagtgagaatctc

SEQ ID NO: 42238 - DNA, 20 bp, Streptococcus thermophilus
agtcgatatcgcatgatatt

SEQ ID NO: 42239 - DNA, 20 bp, Vibrio cholerae
tgattaaggtattaacttaa

SEQ ID NO: 42240 - DNA, 20 bp, Leptotrichia buccalis
aacagacggaaacgactgat

SEQ ID NO: 42241 - DNA, 20 bp, Campylobacter sputorum
tcgaaccgcatggttcgata

SEQ ID NO: 42242 - DNA, 20 bp, Facklamia ignava
tgactaataccgcatagttg

SEQ ID NO: 42243 - DNA, 20 bp, Corynebacterium group ANF
gataactcgcggaaacgcga

SEQ ID NO: 42244 - DNA, 20 bp, Veillonella dispar
agttcctcttcttcggaagc

SEQ ID NO: 42245 - DNA, 20 bp, Campylobacter rectus
cattgcgaaagcgatctgct

SEQ ID NO: 42246 - DNA, 20 bp, Anaerococcus tetradius
acagtaccatacgaataagg

SEQ ID NO: 42247 - DNA, 20 bp, Streptococcus ratti
caggacttgagtgcagaagg

SEQ ID NO: 42248 - DNA, 20 bp, Leuconostoc pseudomesenteroides
cgctttggcgtcacctagag

SEQ ID NO: 42249 - DNA, 20 bp, Pseudoramibacter alactolyticus
tggggaagaaaacatgacgg

SEQ ID NO: 42250 - DNA, 20 bp, Clostridium sordellii
atgagagtcgcatggctttt

SEQ ID NO: 42251 - DNA, 20 bp, Streptococcus dysgalactiae
tgcttgcaccggttcaagga

SEQ ID NO: 42252 - DNA, 20 bp, Prevotella bivia
agtgcgcacaacgtaggcgg

SEQ ID NO: 42253 - DNA, 20 bp, Anaerococcus prevotii
ccttaagtggattagtggcg

SEQ ID NO: 42254 - DNA, 20 bp, Streptococcus dysgalactiae
gttagagaagaatgatggtg

SEQ ID NO: 42255 - DNA, 20 bp, Brevibacillus borstelensis
agtcccttcgggggctagcg

SEQ ID NO: 42256 - DNA, 20 bp, Budvicia aquatica
gctcgcgagagtaagcggac

SEQ ID NO: 42257 - DNA, 20 bp, Fusobacterium mortiferum
catgcaagtctacttgatcc

SEQ ID NO: 42258 - DNA, 20 bp, Paenibacillus amylolyticus
aaggctcaaccttggttcgc

SEQ ID NO: 42259 - DNA, 20 bp, Neisseria polysaccharea
aggctgttgctaatatcagc

SEQ ID NO: 42260 - DNA, 20 bp, Bacteroides distasonis
cactagctgtttgcgataca

SEQ ID NO: 42261 - DNA, 20 bp, Moraxella  catarrhalis
gcttgcttctgatacttagt

SEQ ID NO: 42262 - DNA, 20 bp, Bacteroides distasonis
acctgaagtccgtaaccgaa

SEQ ID NO: 42263 - DNA, 20 bp, Paenibacillus lautus
ataccggataatttatttca

SEQ ID NO: 42264 - DNA, 20 bp, Paenibacillus peoriae
agagatagatctttccttcg

SEQ ID NO: 42265 - DNA, 20 bp, Haemophilus ducreyi
tatacagagggcggcaaacc

SEQ ID NO: 42266 - DNA, 20 bp, Facklamia ignava
ccagtcgcatgactggaatg

SEQ ID NO: 42267 - DNA, 20 bp, Kocuria kristinae
gacatacaccggatcgttcc

SEQ ID NO: 42268 - DNA, 20 bp, Suttonella indologenes
ggtgggggataacgtatgga

SEQ ID NO: 42269 - DNA, 20 bp, Streptococcus suis
atttttcttcggaacactgg

SEQ ID NO: 42270 - DNA, 20 bp, Bacteroides capilosus
gctctgagatggcctcgcgt

SEQ ID NO: 42271 - DNA, 20 bp, Gemella haemolysans
gctcgcgagagtaagcaaac

SEQ ID NO: 42272 - DNA, 20 bp, Porphyromonas endodontalis
ctgtagtcttgccgttgaaa

SEQ ID NO: 42273 - DNA, 20 bp, Pasteurella aerogenes
tgatgaggaaggcggttagt

SEQ ID NO: 42274 - DNA, 20 bp, Corynebacterium confusum
taccggataggaccgcactt

SEQ ID NO: 42275 - DNA, 20 bp, Cellulosimicrobium cellulans
atgcacgagaagccaccaga

SEQ ID NO: 42276 - DNA, 20 bp, Turicella otitidis
ctaggtgtgagggtcttttc

SEQ ID NO: 42277 - DNA, 20 bp, Ochrobactrum intermedium
gatccagccatgccgcgtga

SEQ ID NO: 42278 - DNA, 20 bp, Campylobacter sputorum
ctttgggaagaataatgacg

SEQ ID NO: 42279 - DNA, 20 bp, Propionibacterium freudenreichii
gcctttttggctggtacaca

SEQ ID NO: 42280 - DNA, 20 bp, Arcanobacterium bernardiae
gtgcagccttcggggtggtg

SEQ ID NO: 42281 - DNA, 20 bp, Fusobacterium nucleatum
cggtttgggtggcggacggg

SEQ ID NO: 42282 - DNA, 20 bp, Bacillus sp
gataacttttctctccgcat

SEQ ID NO: 42283 - DNA, 20 bp, Virgibacillus pantothenticus
acgcccctagagatagggag

SEQ ID NO: 42284 - DNA, 20 bp, Prevotella loescheii
ttaattcgatgatacgcgag

SEQ ID NO: 42285 - DNA, 20 bp, Corynebacterium group ANF
gtggattgcgggtgctcgag

SEQ ID NO: 42286 - DNA, 20 bp, Aerococcus urinae
aagcaagcgaatctcttaaa

SEQ ID NO: 42287 - DNA, 20 bp, Atopobium parvulum
cccgagtcgattgcacccga

SEQ ID NO: 42288 - DNA, 20 bp, Brevibacterium epidermidis
accgttctggaaacagttct

SEQ ID NO: 42289 - DNA, 20 bp, Streptococcus constellatus
tgtttaaaaggtgcaagagc

SEQ ID NO: 42290 - DNA, 20 bp, Moraxella osloensis
ctgcatgtgatactggtggt

SEQ ID NO: 42291 - DNA, 20 bp, Actinomyces bovis
aacgataggaagagggaatg

SEQ ID NO: 42292 - DNA, 20 bp, Staphylococcus muscae
acagacgaggtgcttgcacc

SEQ ID NO: 42293 - DNA, 20 bp, Clostridium botulinum
ataagagaatcgcatgattt

SEQ ID NO: 42294 - DNA, 20 bp, Propionibacterium freudenreichii
gcgtgcctttttggctggta

SEQ ID NO: 42295 - DNA, 20 bp, Lactococcus lactis
tacatgcaagttgagcgctg

SEQ ID NO: 42296 - DNA, 20 bp, Kingella kingae
cgctttgagaaggaaagcag

SEQ ID NO: 42297 - DNA, 20 bp, Haemophilus segnis
gtagagtcgagagacgaaag

SEQ ID NO: 42298 - DNA, 20 bp, Corynebacterium glucuronolyticum
gagctaatcgcgaaagccag

SEQ ID NO: 42299 - DNA, 20 bp, Bacteroides eggerthii
gtcgaggggcagcatgattg

SEQ ID NO: 42300 - DNA, 20 bp, Stenotrophomonas maltophilia
actgcagtggatactggatg

SEQ ID NO: 42301 - DNA, 20 bp, Facklamia ignava
agagtaactgttataggttt

SEQ ID NO: 42302 - DNA, 20 bp, Lactococcus garvieae
agaatcgcatgattcttatt

SEQ ID NO: 42303 - DNA, 20 bp, Leptotrichia buccalis
cagcacgcatgtgcccggca

SEQ ID NO: 42304 - DNA, 20 bp, Peptostreptococcus anaerobius
gtagttagcctccgaaactg

SEQ ID NO: 42305 - DNA, 20 bp, Campylobacter curvus
tgagctagtcttggcagtaa

SEQ ID NO: 42306 - DNA, 20 bp, Corynebacterium falsenii
gcccttgcttgcaggggtac

SEQ ID NO: 42307 - DNA, 20 bp, Neisseria polysaccharea
gctaatatcagcggctgatg

SEQ ID NO: 42308 - DNA, 20 bp, Neisseria meningitidis
agagaaagcaggggactttc

SEQ ID NO: 42309 - DNA, 20 bp, Propionibacterium avidum
tgcctccttgtggggctggt

SEQ ID NO: 42310 - DNA, 20 bp, Streptococcus gordonii
acaccatagactgtgagttg

SEQ ID NO: 42311 - DNA, 20 bp, Oligella urethralis
cctaagacttttcttcgttg

SEQ ID NO: 42312 - DNA, 20 bp, Haemophilus segnis
agcgaggaaggcatttagtt

SEQ ID NO: 42313 - DNA, 20 bp, Campylobacter curvus
ctagagatagaagagtgtct

SEQ ID NO: 42314 - DNA, 20 bp, Clostridium paraputrificum
aagtagcaattaaaggagca

SEQ ID NO: 42315 - DNA, 20 bp, Propionibacterium freudenreichii
ggcggttgatcacgtcggaa

SEQ ID NO: 42316 - DNA, 20 bp, Acinetobacter johnsonii
aggaggaggctacttggatt

SEQ ID NO: 42317 - DNA, 20 bp, Bacteroides capilosus
aaggtgggttcgataattgg

SEQ ID NO: 42318 - DNA, 20 bp, Streptococcus infantarius
acagcatttaacccatgtta

SEQ ID NO: 42319 - DNA, 20 bp, Clostridium clostridiiforme
ccgcatggtctggtgcgaaa

SEQ ID NO: 42320 - DNA, 20 bp, Actinomyces meyeri
agccgcaactgtgggttgtg

SEQ ID NO: 42321 - DNA, 20 bp, Acinetobacter radioresistens
gaggctacctagattaatac

SEQ ID NO: 42322 - DNA, 20 bp, Fusobacterium mortiferum
aagaacttgccctgcagtct

SEQ ID NO: 42323 - DNA, 20 bp, Leptotrichia buccalis
ctgtttggctagagtgctgg

SEQ ID NO: 42324 - DNA, 20 bp, Gemella bergeri
ccgaaagggaggagccggtc

SEQ ID NO: 42325 - DNA, 20 bp, Alicyclobacillus acidocaldarius
aaagccatcccatggttgag

SEQ ID NO: 42326 - DNA, 20 bp, Pediococcus inopinatus
aaagtaaaccgcatggtttt

SEQ ID NO: 42327 - DNA, 20 bp, Tissierella praeacuta
gtcgcatgagatttaagtca

SEQ ID NO: 42328 - DNA, 20 bp, Lactococcus garvieae
gtgctatccttagagataag

SEQ ID NO: 42329 - DNA, 20 bp, Bacillus sp
tccgcatggagagagattga

SEQ ID NO: 42330 - DNA, 20 bp, Streptococcus ratti
aatattaattattgcatgat

SEQ ID NO: 42331 - DNA, 20 bp, Unknown Organism
  oligonucleotide from CDC group EF-4B
ccgcatacactttgagaagg

SEQ ID NO: 42332 - DNA, 20 bp, Alcaligenes faecalis
ttggggccgttaggccttag

SEQ ID NO: 42333 - DNA, 20 bp, Micrococcus luteus
taggagcgcccaccgcatgg

SEQ ID NO: 42334 - DNA, 20 bp, Bacillus badius
gtaactgtccgtaccttgac

SEQ ID NO: 42335 - DNA, 20 bp, Acinetobacter haemolyticus
gcggctgattaagtcggatg

SEQ ID NO: 42336 - DNA, 20 bp, Oligella urethralis
ctcaaaccagctacagatcc

SEQ ID NO: 42337 - DNA, 20 bp, Dermabacter hominis
aagctgtgcttgcacagtgg

SEQ ID NO: 42338 - DNA, 20 bp, Streptococcus thermophilus
ccgcataaaagtcgatatcg

SEQ ID NO: 42339 - DNA, 20 bp, Propionibacterium granulosum
cggttggggactcagtggag

SEQ ID NO: 42340 - DNA, 20 bp, Proteus vulgaris
cggggctaataccgcatgac

SEQ ID NO: 42341 - DNA, 20 bp, Bacteroides forsythus
ggcgggactgccggcgtaag

SEQ ID NO: 42342 - DNA, 20 bp, Bacillus fusiformis
ctgtcgctataggatgggcc

SEQ ID NO: 42343 - DNA, 20 bp, Bacteroides vulgatus
gttgtcagttactaacaggt

SEQ ID NO: 42344 - DNA, 20 bp, Clostridium innocuum
agctaaaaccggataggtat

SEQ ID NO: 42345 - DNA, 20 bp, Prevotella disiens
tgaggtccttcgggactcct

SEQ ID NO: 42346 - DNA, 20 bp, Photobacterium damselae
gaagagattcgagtgtgcct

SEQ ID NO: 42347 - DNA, 20 bp, Bacillus alcalophilus
atcacatggttcttttgtaa

SEQ ID NO: 42348 - DNA, 20 bp, Alicyclobacillus acidocaldarius
cactggggtgtgtcccccca

SEQ ID NO: 42349 - DNA, 20 bp, Dermabacter hominis
aactcgaggcttaaccttgg

SEQ ID NO: 42350 - DNA, 20 bp, Bacteroides capilosus
cagtccgaaaggactgctaa

SEQ ID NO: 42351 - DNA, 20 bp, Paenibacillus amylolyticus
ctggtgtttaaggccaaggc

SEQ ID NO: 42352 - DNA, 20 bp, Aeromonas veronii
ggttggtagctaataactgc

SEQ ID NO: 42353 - DNA, 20 bp, Porphyromonas endodontalis
attgattacagatgggcatg

SEQ ID NO: 42354 - DNA, 20 bp, Prevotella intermedia
cgactctcatatgttatccc

SEQ ID NO: 42355 - DNA, 20 bp, Dietzia maris
gcatgcatgtgttgtggtgg

SEQ ID NO: 42356 - DNA, 20 bp, Moraxella lacunata
gttaccagcgatttaagtcg

SEQ ID NO: 42357 - DNA, 20 bp, Tissierella praeacuta
acttaaatgtcgcatgagat

SEQ ID NO: 42358 - DNA, 20 bp, Corynebacterium coyleae
taggaccacattttggatgg

SEQ ID NO: 42359 - DNA, 20 bp, Facklamia languida
aacacgtggagaacctaccc

SEQ ID NO: 42360 - DNA, 20 bp, Helcococcus kunzii
gaatcgcataaaacagatct

SEQ ID NO: 42361 - DNA, 20 bp, Arcanobacterium bernardiae
gggttggaaagggtttctgg

SEQ ID NO: 42362 - DNA, 20 bp, Streptococcus anginosus
gtgagaatggaaagttcata

SEQ ID NO: 42363 - DNA, 20 bp, Corynebacterium group F
cagcgcgtttgctaccttgt

SEQ ID NO: 42364 - DNA, 20 bp, Bacteroides uniformis
gcatagttcttccgcatggt

SEQ ID NO: 42365 - DNA, 20 bp, Leuconostoc argentinum
atagggaatgattctagttc

SEQ ID NO: 42366 - DNA, 20 bp, Clostridium glycolicum
cttatcaaagctccggcggt

SEQ ID NO: 42367 - DNA, 20 bp, Campylobacter curvus
tctcgctatgggatgaggct

SEQ ID NO: 42368 - DNA, 20 bp, Eggerthella lenta
aaccgccctcgggcggacat

SEQ ID NO: 42369 - DNA, 20 bp, Arcanobacterium bernardiae
actcctttcagtacagaaca

SEQ ID NO: 42370 - DNA, 20 bp, Alloiococcus otitis
tcaaccgtggaacggcattg

SEQ ID NO: 42371 - DNA, 20 bp, Streptococcus thoraltensis
ggtgacagtaagctaatctc

SEQ ID NO: 42372 - DNA, 20 bp, Delftia acidovorans
gcttctcctaatacgagagg

SEQ ID NO: 42373 - DNA, 20 bp, Bacteroides thetaiotaomicron
ttttccacgtgtggaatttt

SEQ ID NO: 42374 - DNA, 20 bp, Nocardia asteroides
ggaggctcctttagttaata

SEQ ID NO: 42375 - DNA, 20 bp, Helcococcus ovis
aagttaaagaatttcggtga

SEQ ID NO: 42376 - DNA, 20 bp, Vibrio cholerae
taccgggcaatttcccaggc

SEQ ID NO: 42377 - DNA, 20 bp, Alicyclobacillus acidocaldarius
ccgctctccccgagcaacag

SEQ ID NO: 42378 - DNA, 20 bp, Prevotella bivia
gggagcgtaggccgtttggt

SEQ ID NO: 42379 - DNA, 20 bp, Eikenella corrodens
agggaagtgctaataccact

SEQ ID NO: 42380 - DNA, 20 bp, Atopobium parvulum
ccggcagacttgagtttggt

SEQ ID NO: 42381 - DNA, 20 bp, Helcococcus kunzii
gagcaagcgaatcgcataaa

SEQ ID NO: 42382 - DNA, 20 bp, Anaerococcus tetradius
tatagtaagcttttaaaact

SEQ ID NO: 42383 - DNA, 20 bp, Alcaligenes faecalis
ggcagagaagaaaaggtacc

SEQ ID NO: 42384 - DNA, 20 bp, Proteus vulgaris
gatttagaggttgtggtctt

SEQ ID NO: 42385 - DNA, 20 bp, Chromobacterium violaceum
tgcttgcaccgctgacgagt

SEQ ID NO: 42386 - DNA, 20 bp, Moraxella  catarrhalis
aaggcagctccctggcatca

SEQ ID NO: 42387 - DNA, 20 bp, Weeksella virosa
cagtggtgaaatcctatcgc

SEQ ID NO: 42388 - DNA, 20 bp, Streptococcus equinus
catttaacacatgttagatg

SEQ ID NO: 42389 - DNA, 20 bp, Unknown Organism
  oligonucleotide from CDC group EO-2
gggttgtaaagctctttcag

SEQ ID NO: 42390 - DNA, 20 bp, Dermabacter hominis
ccgatggcccaagctttatg

SEQ ID NO: 42391 - DNA, 20 bp, Bacillus badius
ggaagaacaagtacggaagt

SEQ ID NO: 42392 - DNA, 20 bp, Paenibacillus apiarius
agggctcaaccttgggtcgc

SEQ ID NO: 42393 - DNA, 20 bp, Campylobacter concisus
ttgtggggctggtgtacagg

SEQ ID NO: 42394 - DNA, 20 bp, Propionibacterium freudenreichii
caatgttgccagcagttcgg

SEQ ID NO: 42395 - DNA, 20 bp, Facklamia languida
cagcgaactcgcaagggcaa

SEQ ID NO: 42396 - DNA, 20 bp, Pseudoramibacter alactolyticus
cttcgggtgaaattagaact

SEQ ID NO: 42397 - DNA, 20 bp, Anaerobiospirillum succiniciproducens
gtctcctgggcaaatactga

SEQ ID NO: 42398 - DNA, 20 bp, Haemophilus actinemycetemcomitans
tcggacggtagcaggtaagt

SEQ ID NO: 42399 - DNA, 20 bp, Porphyromonas endodontalis
cccgcgtcgatagttactaa

SEQ ID NO: 42400 - DNA, 20 bp, Streptococcus sanguinis
cgcatgataattaattgaaa

SEQ ID NO: 42401 - DNA, 20 bp, Tetragenococcus halophilus
ggaacctatccatcagcggg

SEQ ID NO: 42402 - DNA, 20 bp, Streptococcus porcinus
aagacccatgtcatctactt

SEQ ID NO: 42403 - DNA, 20 bp, Moraxella osloensis
cattaagtcacatgtgaaat

SEQ ID NO: 42404 - DNA, 20 bp, Prevotella intermedia
actctcatatgttatcccgt

SEQ ID NO: 42405 - DNA, 20 bp, Corynebacterium propinquum
ctcaaactcgtttagggagc

SEQ ID NO: 42406 - DNA, 20 bp, Oligella ureolytica
gtaaaccacttttctcaacg

SEQ ID NO: 42407 - DNA, 20 bp, Clostridium clostridiiforme
gtgagatggatccgcgtctg

SEQ ID NO: 42408 - DNA, 20 bp, Actinomyces bovis
taatagttatggcggataca

SEQ ID NO: 42409 - DNA, 20 bp, Eggerthella lenta
ggagcgtccgcaggtggtgc

SEQ ID NO: 42410 - DNA, 20 bp, Paenibacillus thiaminolyticus
gaacgctatggagagtaact

SEQ ID NO: 42411 - DNA, 20 bp, Streptococcus ratti
accgcataatattaattatt

SEQ ID NO: 42412 - DNA, 20 bp, Abiotrophia defectiva
gaacagcgcatagagtaact

SEQ ID NO: 42413 - DNA, 20 bp, Fusobacterium mortiferum
ttatgtgagtttcgcatgaa

SEQ ID NO: 42414 - DNA, 20 bp, Leuconostoc pseudomesenteroides
taaaaggcgctttggcgtca

SEQ ID NO: 42415 - DNA, 20 bp, Chromobacterium violaceum
atccttggtagcgtagctaa

SEQ ID NO: 42416 - DNA, 20 bp, Gemella haemolysans
gagccggtcacggtgggaca

SEQ ID NO: 42417 - DNA, 20 bp, Propionibacterium granulosum
tgctaatactggatatgtgc

SEQ ID NO: 42418 - DNA, 20 bp, Morganella morganii
tactggtcagctagagtctt

SEQ ID NO: 42419 - DNA, 20 bp, Corynebacterium falsenii
agggaagaagccacttgtgg

SEQ ID NO: 42420 - DNA, 20 bp, Bacteroides fragilis
gtatgtattatatgaataag

SEQ ID NO: 42421 - DNA, 20 bp, Corynebacterium propinquum
tttggggtttctgtgccgta

SEQ ID NO: 42422 - DNA, 20 bp, Mannheimia haemolytica
gtaatgtctaaggactaaag

SEQ ID NO: 42423 - DNA, 20 bp, Moraxella osloensis
agattagacgttacctgcag

SEQ ID NO: 42424 - DNA, 20 bp, Prevotella intermedia
cctttcactttctggcttga

SEQ ID NO: 42425 - DNA, 20 bp, Streptococcus gordonii
cacagtttataccgtagctt

SEQ ID NO: 42426 - DNA, 20 bp, Streptococcus hyovaginalis
aggatttcccttcggggcac

SEQ ID NO: 42427 - DNA, 20 bp, Corynebacterium group F
gctaatcgcacaaagccggc

SEQ ID NO: 42428 - DNA, 20 bp, Streptococcus alactolyticus
gatgcaattgcatcactacg

SEQ ID NO: 42429 - DNA, 20 bp, Paenibacillus larvae
gggataacttgcggaaacgt

SEQ ID NO: 42430 - DNA, 20 bp, Bacteroides ureolyticus
tactcctatttaacataagt

SEQ ID NO: 42431 - DNA, 20 bp, Clostridium butyricum
cggtacaatgagatgcaacc

SEQ ID NO: 42432 - DNA, 20 bp, Leptotrichia buccalis
tagagtgctggagaggtgga

SEQ ID NO: 42433 - DNA, 20 bp, Paenibacillus peoriae
agaagcttgcttctaaacaa

SEQ ID NO: 42434 - DNA, 20 bp, Corynebacterium group F
taatcgcacaaagccggcct

SEQ ID NO: 42435 - DNA, 20 bp, Helcococcus ovis
atagtttcttcggaaacttg

SEQ ID NO: 42436 - DNA, 20 bp, Clostridium botulinum
aactccccctgtgccgcagt

SEQ ID NO: 42437 - DNA, 20 bp, Myroides odoratus
ctaccaggcaactggatgcg

SEQ ID NO: 42438 - DNA, 20 bp, Oligella ureolytica
aaccctgatcgagccatccc

SEQ ID NO: 42439 - DNA, 20 bp, Plesiomonas shigelloides
ctcatgctatcggatgaacc

SEQ ID NO: 42440 - DNA, 20 bp, Vibrio cholerae
atccggtagcgcaaggcccg

SEQ ID NO: 42441 - DNA, 20 bp, Bacteroides uniformis
ctacacggcgacgtgatgcc

SEQ ID NO: 42442 - DNA, 20 bp, Abiotrophia defectiva
agaagaacagcgcatagagt

SEQ ID NO: 42443 - DNA, 20 bp, Prevotella bivia
cgggacatctgtgaaggtgc

SEQ ID NO: 42444 - DNA, 20 bp, Peptoniphilus indolicus
ggcttgacataatattgacc

SEQ ID NO: 42445 - DNA, 20 bp, Alcaligenes faecalis
gtactgctgacggtatctgc

SEQ ID NO: 42446 - DNA, 20 bp, Paenibacillus validus
agaccggatagctggtttct

SEQ ID NO: 42447 - DNA, 20 bp, Moraxella lacunata
tgagcggcaggcttaacaca

SEQ ID NO: 42448 - DNA, 20 bp, Streptococcus parauberis
tcgctttggaaactggataa

SEQ ID NO: 42449 - DNA, 20 bp, Bacteroides ovatus
tatattggaaacagtatagc

SEQ ID NO: 42450 - DNA, 20 bp, Pseudoramibacter alactolyticus
atgaaaactccggtgccata

SEQ ID NO: 42451 - DNA, 20 bp, Clostridium glycolicum
aggtggtttcttaagtcagg

SEQ ID NO: 42452 - DNA, 20 bp, Fusobacterium varium
agctgcaaacctgcgagggt

SEQ ID NO: 42453 - DNA, 20 bp, Leptotrichia buccalis
tagcgagactgcctgcgaag

SEQ ID NO: 42454 - DNA, 20 bp, Facklamia hominis
aagaacgaccgctagagtaa

SEQ ID NO: 42455 - DNA, 20 bp, Proteus penneri
aatacctttatcaattgacg

SEQ ID NO: 42456 - DNA, 20 bp, Peptostreptococcus anaerobius
tggataacatactgaaaagt

SEQ ID NO: 42457 - DNA, 20 bp, Bacteroides uniformis
ctacacggcgacgtgatgct

SEQ ID NO: 42458 - DNA, 20 bp, Prevotella oralis
cttttgatggcgaccggcgc

SEQ ID NO: 42459 - DNA, 20 bp, Weeksella virosa
tgaaatcctatcgcttaacg

SEQ ID NO: 42460 - DNA, 20 bp, Haemophilus segnis
atgtcgatttgggggttgaa

SEQ ID NO: 42461 - DNA, 20 bp, Anaerobiospirillum succiniciproducens
cgatgtcgattaggagcttg

SEQ ID NO: 42462 - DNA, 20 bp, Helcococcus ovis
agaattttttaattaatttc

SEQ ID NO: 42463 - DNA, 20 bp, Prevotella denticola
cacaagggacactacatctc

SEQ ID NO: 42464 - DNA, 20 bp, Neisseria lactamica
ccttacccggttttgacatg

SEQ ID NO: 42465 - DNA, 20 bp, Peptostreptococcus anaerobius
ctttcaagtcggtggttaaa

SEQ ID NO: 42466 - DNA, 20 bp, Peptostreptococcus anaerobius
catcgtagatatatcaaagt

SEQ ID NO: 42467 - DNA, 20 bp, Granulicatella adiacens
gcactggtcaatctagtggc

SEQ ID NO: 42468 - DNA, 20 bp, Paenibacillus validus
cgggataggttagcggcgga

SEQ ID NO: 42469 - DNA, 20 bp, Brevibacillus thermoruber
aagctaccacttgcggatgg

SEQ ID NO: 42470 - DNA, 20 bp, Listeria ivanovii
ggctaataccgaatgataag

SEQ ID NO: 42471 - DNA, 20 bp, Clostridium botulinum
attgtaaagccctgttttct

SEQ ID NO: 42472 - DNA, 20 bp, Bacillus alcalophilus
tcggggctcaaccccgaggg

SEQ ID NO: 42473 - DNA, 20 bp, Citrobacter koseri
tgagactgtgccttcgggag

SEQ ID NO: 42474 - DNA, 20 bp, Plesiomonas shigelloides
catgctatcggatgaaccca

SEQ ID NO: 42475 - DNA, 20 bp, Lactococcus lactis
aaagatgatcccgcgttgta

SEQ ID NO: 42476 - DNA, 20 bp, Lactococcus garvieae
taagaccgatgactggggtg

SEQ ID NO: 42477 - DNA, 20 bp, Vibrio hollisae
tcacgctattcgagcggccg

SEQ ID NO: 42478 - DNA, 20 bp, Bacteroides fragilis
attccgcatggtttcattat

SEQ ID NO: 42479 - DNA, 20 bp, Tetragenococcus halophilus
ttttctatgacggtagctga

SEQ ID NO: 42480 - DNA, 20 bp, Sphingobacterium multivorum
tgaagtgggcggaataagac

SEQ ID NO: 42481 - DNA, 20 bp, Brevibacillus borstelensis
agacgaacaagtaccgttcg

SEQ ID NO: 42482 - DNA, 20 bp, Clostridium cadaveris
atacctctgtgccgccgtaa

SEQ ID NO: 42483 - DNA, 20 bp, Weeksella virosa
tcagtggtgaaatcctatcg

SEQ ID NO: 42484 - DNA, 20 bp, Paenibacillus alvei
aatgtaagttgggtgtttaa

SEQ ID NO: 42485 - DNA, 20 bp, Streptococcus pyogenes
ggaaaatccaccaagtgacg

SEQ ID NO: 42486 - DNA, 20 bp, Actinomyces meyeri
cgtgcgtgcatttggttggg

SEQ ID NO: 42487 - DNA, 20 bp, Alicyclobacillus acidocaldarius
ccgggcgttattccggcctg

SEQ ID NO: 42488 - DNA, 20 bp, Anaerococcus prevotii
gtgtaaaaggcagtagctta

SEQ ID NO: 42489 - DNA, 20 bp, Fusobacterium varium
cgcgtctaggcggtttagta

SEQ ID NO: 42490 - DNA, 20 bp, Tetragenococcus halophilus
ccagctcaactggggagggt

SEQ ID NO: 42491 - DNA, 20 bp, Paenibacillus validus
ccggatagctggtttctccg

SEQ ID NO: 42492 - DNA, 20 bp, Leptotrichia buccalis
cgcatgtgcccggcaatgaa

SEQ ID NO: 42493 - DNA, 20 bp, Alicyclobacillus acidocaldarius
ccgcaagaagatgcctcctc

SEQ ID NO: 42494 - DNA, 20 bp, Streptococcus thermophilus
gcttgctcttcttggatgag

SEQ ID NO: 42495 - DNA, 20 bp, Paenibacillus amylolyticus
taaggccaaggctcaacctt

SEQ ID NO: 42496 - DNA, 20 bp, Anaerococcus tetradius
tatcaaagatttatcggtgt

SEQ ID NO: 42497 - DNA, 20 bp, Streptococcus gordonii
gcacagtttataccgtagct

SEQ ID NO: 42498 - DNA, 20 bp, Kocuria kristinae
tccagagatggttcttccct

SEQ ID NO: 42499 - DNA, 20 bp, Streptococcus hyovaginalis
atttcccttcggggcactgg

SEQ ID NO: 42500 - DNA, 20 bp, Clostridium subterminale
ggttggtacaataagatgca

SEQ ID NO: 42501 - DNA, 20 bp, Alicyclobacillus acidocaldarius
cgttattccggcctgaaagg

SEQ ID NO: 42502 - DNA, 20 bp, Enterococcus casseliflavus
attttccgcatggaagaaag

SEQ ID NO: 42503 - DNA, 20 bp, Streptococcus parauberis
taaatttaaaaggagcaatt

SEQ ID NO: 42504 - DNA, 20 bp, Leuconostoc argentinum
ttaacttgagtgttgtagag

SEQ ID NO: 42505 - DNA, 20 bp, Chryseobacterium meningosepticum
acttacgtgtaagtagctga

SEQ ID NO: 42506 - DNA, 20 bp, Salmonella enteritidis
gaatccagagatggatttgt

SEQ ID NO: 42507 - DNA, 20 bp, Bacteroides uniformis
gcaaggcagttgtgaaggtg

SEQ ID NO: 42508 - DNA, 20 bp, Streptococcus dysgalactiae
tggaaaatccaccatgtgac

SEQ ID NO: 42509 - DNA, 20 bp, Bacteroides thetaiotaomicron
tggacagttaagtcagttgt

SEQ ID NO: 42510 - DNA, 20 bp, Haemophilus actinemycetemcomitans
atacagagggtaaccaacca

SEQ ID NO: 42511 - DNA, 20 bp, Prevotella oris
ccgtcgaaagtcggcctaat

SEQ ID NO: 42512 - DNA, 20 bp, Weeksella virosa
ttttcttcggacagaatgca

SEQ ID NO: 42513 - DNA, 20 bp, Pseudomonas luteola
tcgtaaagcactttaagctg

SEQ ID NO: 42514 - DNA, 20 bp, Peptostreptococcus anaerobius
atatatcaaagtgttagcgg

SEQ ID NO: 42515 - DNA, 20 bp, Listeria innocua
ctcttgaaagatggtttcgg

SEQ ID NO: 42516 - DNA, 20 bp, Cardiobacterium hominis
acctagagacaggtgttgca

SEQ ID NO: 42517 - DNA, 20 bp, Tissierella praeacuta
gcccctgaccgtcctagaga

SEQ ID NO: 42518 - DNA, 20 bp, Clostridium paraputrificum
gggaagtcctttcggggaca

SEQ ID NO: 42519 - DNA, 20 bp, Pseudoramibacter alactolyticus
ctgtgagagaaccgcaagga

SEQ ID NO: 42520 - DNA, 20 bp, Methylobacterium mesophilicum
gaaaggcttgctgccggagg

SEQ ID NO: 42521 - DNA, 20 bp, Photobacterium damselae
tgcattatttgacgttacct

SEQ ID NO: 42522 - DNA, 20 bp, Clostridium limosum
ggggtttcaatacttcggtg

SEQ ID NO: 42523 - DNA, 20 bp, Bacillus simplex
ggatacgttcttttctcgca

SEQ ID NO: 42524 - DNA, 20 bp, Propionibacterium freudenreichii
taaggcccctttcggggggt

SEQ ID NO: 42525 - DNA, 20 bp, Finegoldia magna
gacagtgggatagcctcggg

SEQ ID NO: 42526 - DNA, 20 bp, Staphylococcus capitis
ataggacagctgtttagtgt

SEQ ID NO: 42527 - DNA, 20 bp, Actinomyces bovis
aggagcttgctccttggaac

SEQ ID NO: 42528 - DNA, 20 bp, Anaerococcus prevotii
ctcattctgacgctgaggaa

SEQ ID NO: 42529 - DNA, 20 bp, Campylobacter sputorum
ttattgcgaaggcgatctgc

SEQ ID NO: 42530 - DNA, 20 bp, Bacillus lentus
ggcatttcctccgatacttg

SEQ ID NO: 42531 - DNA, 20 bp, Facklamia ignava
ttgagttggggactctagtt

SEQ ID NO: 42532 - DNA, 20 bp, Neisseria meningitidis
cctctgacacactcgagtca

SEQ ID NO: 42533 - DNA, 20 bp, Corynebacterium amycolatum
tcgacgaagggtttctgacg

SEQ ID NO: 42534 - DNA, 20 bp, Vibrio cholerae
cgtctccgctagattctctg

SEQ ID NO: 42535 - DNA, 20 bp, Capnocytophaga gingivalis
ctggtagtcttgaatatctg

SEQ ID NO: 42536 - DNA, 20 bp, Bacteroides thetaiotaomicron
ttgcaaactggagatggcga

SEQ ID NO: 42537 - DNA, 20 bp, Finegoldia magna
acgcgtgagcaacctgccta

SEQ ID NO: 42538 - DNA, 20 bp, Anaerococcus tetradius
agaaaatgacagtaccatac

SEQ ID NO: 42539 - DNA, 20 bp, Bacillus alcalophilus
gcttgctcccagaggttagc

SEQ ID NO: 42540 - DNA, 20 bp, Helcococcus kunzii
agcaagccctggctaaatac

SEQ ID NO: 42541 - DNA, 20 bp, Delftia acidovorans
aattagttttctcagtaacg

SEQ ID NO: 42542 - DNA, 20 bp, Bacillus sp
ttgatcagttagcggcggac

SEQ ID NO: 42543 - DNA, 20 bp, Helcococcus kunzii
cttgagtagatgaggggaaa

SEQ ID NO: 42544 - DNA, 20 bp, Clostridium botulinum
agcaaaacttataaaaccta

SEQ ID NO: 42545 - DNA, 20 bp, Mannheimia haemolytica
accatttggccacctgccat

SEQ ID NO: 42546 - DNA, 20 bp, Bacteroides fragilis
attatatgaataaggatcgg

SEQ ID NO: 42547 - DNA, 20 bp, Corynebacterium glucuronolyticum
tgtaatccaggggcttaact

SEQ ID NO: 42548 - DNA, 20 bp, Morganella morganii
gaaggcaagcggaactcata

SEQ ID NO: 42549 - DNA, 20 bp, Acinetobacter calcoaceticus
gaggctactgaagttaatac

SEQ ID NO: 42550 - DNA, 20 bp, Gemella morbillorum
tcagccaacctcataaaact

SEQ ID NO: 42551 - DNA, 20 bp, Campylobacter lari
gctgctaatactctatactc

SEQ ID NO: 42552 - DNA, 20 bp, Bacteroides fragilis
tggaaacatgtcagtgagca

SEQ ID NO: 42553 - DNA, 20 bp, Porphyromonas endodontalis
agacgcgaggaaggggcgga

SEQ ID NO: 42554 - DNA, 20 bp, Vibrio cholerae
tgggcatatccggtagcgca

SEQ ID NO: 42555 - DNA, 20 bp, Leptotrichia buccalis
acacatgcaagtctttggca

SEQ ID NO: 42556 - DNA, 20 bp, Campylobacter rectus
tcgaggcagtaatgcaccta

SEQ ID NO: 42557 - DNA, 20 bp, Paenibacillus macerans
tgcactcctgagagttagcg

SEQ ID NO: 42558 - DNA, 20 bp, Staphylococcus carnosus
agaaccgcatggttctgcaa

SEQ ID NO: 42559 - DNA, 20 bp, Paenibacillus amylolyticus
accggagtgacggtacctga

SEQ ID NO: 42560 - DNA, 20 bp, Aerococcus viridans
aacagatgaagtgcttgcac

SEQ ID NO: 42561 - DNA, 20 bp, Facklamia ignava
acctacccttcagcggggga

SEQ ID NO: 42562 - DNA, 20 bp, Campylobacter lari
tgctaacacttcgggtgagc

SEQ ID NO: 42563 - DNA, 20 bp, Neisseria subflava
ttgctaacatcagcggctga

SEQ ID NO: 42564 - DNA, 20 bp, Actinomyces neuii
cccgaagcctgtggcctaac

SEQ ID NO: 42565 - DNA, 20 bp, Neisseria meningitidis
gctacgctaccaagcaatca

SEQ ID NO: 42566 - DNA, 20 bp, Streptococcus dysgalactiae
ctgcatcactatgagatgga

SEQ ID NO: 42567 - DNA, 20 bp, Prevotella melaninogenica
ggaaacggcattgagtgctt

SEQ ID NO: 42568 - DNA, 20 bp, Facklamia ignava
cttcagcgggggataaccat

SEQ ID NO: 42569 - DNA, 20 bp, Prevotella melaninogenica
ggtacctggtatcagcggct

SEQ ID NO: 42570 - DNA, 20 bp, Clostridium innocuum
aaggagtgagccgtcgaagt

SEQ ID NO: 42571 - DNA, 20 bp, Clostridium clostridiiforme
actaggtgtcgggggacaaa

SEQ ID NO: 42572 - DNA, 20 bp, Citrobacter amalonaticus
caaagtgccttcgggaactg

SEQ ID NO: 42573 - DNA, 20 bp, Campylobacter coli
ttgttgctctgctagtcagg

SEQ ID NO: 42574 - DNA, 20 bp, Alicyclobacillus acidocaldarius
tctctgagggtgtcagaggg

SEQ ID NO: 42575 - DNA, 20 bp, Arcanobacterium haemolyticum
aaggcgaaagttgagggtag

SEQ ID NO: 42576 - DNA, 20 bp, Oligella ureolytica
agttgaggaataagcaccgg

SEQ ID NO: 42577 - DNA, 20 bp, Bacillus sp
ggccctagagatagggagtt

SEQ ID NO: 42578 - DNA, 20 bp, Serratia proteamaculans
ggtagtgtgttaatagcaca

SEQ ID NO: 42579 - DNA, 20 bp, Actinomyces viscosus
gacggggtttcctcctttgg

SEQ ID NO: 42580 - DNA, 20 bp, Anaerococcus prevotii
actgtaagcatttgaaactg

SEQ ID NO: 42581 - DNA, 20 bp, Methylobacterium mesophilicum
tgttggggtgcttgcaccgc

SEQ ID NO: 42582 - DNA, 20 bp, Haemophilus segnis
agtgcgagctggagcgaatc

SEQ ID NO: 42583 - DNA, 20 bp, Fusobacterium mortiferum
cctgcagtctgggacaacat

SEQ ID NO: 42584 - DNA, 20 bp, Actinomyces odontolyticus
cacggcggcactgcagagat

SEQ ID NO: 42585 - DNA, 20 bp, Bacillus lentus
gattcgctcatgcgtcgccg

SEQ ID NO: 42586 - DNA, 20 bp, Fusobacterium mortiferum
gtgatggtggcggacgggtg

SEQ ID NO: 42587 - DNA, 20 bp, Facklamia ignava
tgactggaatgggaaagacg

SEQ ID NO: 42588 - DNA, 20 bp, Gemella morbillorum
acctttaaggagggagccgg

SEQ ID NO: 42589 - DNA, 20 bp, Bacteroides thetaiotaomicron
aaactggagatggcgaccgg

SEQ ID NO: 42590 - DNA, 20 bp, Bacillus lentus
ctccagggcggtcaggagat

SEQ ID NO: 42591 - DNA, 20 bp, Propionibacterium freudenreichii
gaggaacgtgcccttgactt

SEQ ID NO: 42592 - DNA, 20 bp, Actinomyces meyeri
actgtgggttgtggtgaggg

SEQ ID NO: 42593 - DNA, 20 bp, Actinomyces naeslundii
tggataaccgcatgaaagtg

SEQ ID NO: 42594 - DNA, 20 bp, Dermabacter hominis
ccaagctttatgcggggagt

SEQ ID NO: 42595 - DNA, 20 bp, Actinomyces bovis
gcagcgatgcggagcgaatc

SEQ ID NO: 42596 - DNA, 20 bp, Leuconostoc lactis
tgtagggttgaaagatggtt

SEQ ID NO: 42597 - DNA, 20 bp, Bacillus flexus
gcttctatgacgttagcggc

SEQ ID NO: 42598 - DNA, 20 bp, Corynebacterium coyleae
tacaacgcgtctgcgagcct

SEQ ID NO: 42599 - DNA, 20 bp, Bacillus simplex
tttctcgcatgagagaagat

SEQ ID NO: 42600 - DNA, 20 bp, Bacteroides thetaiotaomicron
ccgggcttaaattgcatttg

SEQ ID NO: 42601 - DNA, 20 bp, Bacteroides distasonis
tttgcgatacacagtaagcg

SEQ ID NO: 42602 - DNA, 20 bp, Arcanobacterium bernardiae
ctttcagtacagaacaaggc

SEQ ID NO: 42603 - DNA, 20 bp, Neisseria lactamica
gaacgtaccgggcagtgggg

SEQ ID NO: 42604 - DNA, 20 bp, Brevibacterium epidermidis
tggaccgttctggaaacagt

SEQ ID NO: 42605 - DNA, 20 bp, Neisseria meningitidis
caggtaccgtcatcagccgc

SEQ ID NO: 42606 - DNA, 20 bp, Actinomyces bovis
ttggagaaattcagtgctgt

SEQ ID NO: 42607 - DNA, 20 bp, Clostridium botulinum
taagagaatcgcatgatttt

SEQ ID NO: 42608 - DNA, 20 bp, Bacteroides thetaiotaomicron
atggtcttgttattaaagaa

SEQ ID NO: 42609 - DNA, 20 bp, Gemella haemolysans
aactgcatggttgatgttta

SEQ ID NO: 42610 - DNA, 20 bp, Peptostreptococcus anaerobius
gatatatcaaagtgttagcg

SEQ ID NO: 42611 - DNA, 20 bp, Gemella sanguinis
catagacggggacaactatt

SEQ ID NO: 42612 - DNA, 20 bp, Alloiococcus otitis
ccaaagccattctcagttcg

SEQ ID NO: 42613 - DNA, 20 bp, Fusobacterium mortiferum
tttcagttgggacgaagtaa

SEQ ID NO: 42614 - DNA, 20 bp, Fusobacterium nucleatum
aaagctataagcgctgtgag

SEQ ID NO: 42615 - DNA, 20 bp, Prevotella bivia
tcgggacatctgtgaaggtg

SEQ ID NO: 42616 - DNA, 20 bp, Fusobacterium varium
aagcgcgtctaggcggttta

SEQ ID NO: 42617 - DNA, 20 bp, Bacteroides forsythus
ttgtaaacttcttttacagg

SEQ ID NO: 42618 - DNA, 20 bp, Haemophilus segnis
tatacagagggaagcgagag

SEQ ID NO: 42619 - DNA, 20 bp, Streptococcus parasanguinis
cattgcatgatgttgacttg

SEQ ID NO: 42620 - DNA, 20 bp, Leuconostoc fallax
tgtggaatggctttggaaac

SEQ ID NO: 42621 - DNA, 20 bp, Oligella urethralis
cccattgtcgaaaattcccc

SEQ ID NO: 42622 - DNA, 20 bp, Bacteroides thetaiotaomicron
gccgtaaggcaaatgtgaag

SEQ ID NO: 42623 - DNA, 20 bp, Bacillus flexus
cgagcgaactgattagaagc

SEQ ID NO: 42624 - DNA, 20 bp, Bacteroides distasonis
aggactctggtgggactgcc

SEQ ID NO: 42625 - DNA, 20 bp, Eggerthella lenta
aaagcccagacggcaaggga

SEQ ID NO: 42626 - DNA, 20 bp, Propionibacterium avidum
cttcggcggttttggatgga

SEQ ID NO: 42627 - DNA, 20 bp, Corynebacterium group F
gccagtgcttgcactggtac

SEQ ID NO: 42628 - DNA, 20 bp, Prevotella intermedia
gggaaacggcattatgtgct

SEQ ID NO: 42629 - DNA, 20 bp, Streptococcus agalactiae
cgcataagagtaattaacac

SEQ ID NO: 42630 - DNA, 20 bp, Veillonella dispar
agatagttcctcttcttcgg

SEQ ID NO: 42631 - DNA, 20 bp, Brochothrix campestris
accgaatgtgctgaacatca

SEQ ID NO: 42632 - DNA, 20 bp, Corynebacterium xerosis
aaggcctgcagcttgctgcg

SEQ ID NO: 42633 - DNA, 20 bp, Moraxella osloensis
taggtggctcattaagtcac

SEQ ID NO: 42634 - DNA, 20 bp, Myroides odoratus
aattcggattaatgctccat

SEQ ID NO: 42635 - DNA, 20 bp, Aerococcus christensenii
cacgtaaggaacctaccgat

SEQ ID NO: 42636 - DNA, 20 bp, Moraxella osloensis
atactggtggtgctagaata

SEQ ID NO: 42637 - DNA, 20 bp, Lactococcus garvieae
tagggagctataagttctct

SEQ ID NO: 42638 - DNA, 20 bp, Lactococcus garvieae
ggagctataagttctctgta

SEQ ID NO: 42639 - DNA, 20 bp, Clostridium subterminale
ttctgtcatatgggaagata

SEQ ID NO: 42640 - DNA, 20 bp, Prevotella melaninogenica
acgtctgacttgcagcgcat

SEQ ID NO: 42641 - DNA, 20 bp, Gemella morbillorum
ctagatgttgcatgacattt

SEQ ID NO: 42642 - DNA, 20 bp, Bacteroides uniformis
cgcaaggcagttgtgaaggt

SEQ ID NO: 42643 - DNA, 20 bp, Peptoniphilus indolicus
tcaaagatggactcgcgtct

SEQ ID NO: 42644 - DNA, 20 bp, Gemella haemolysans
aggagggagccggtcacggt

SEQ ID NO: 42645 - DNA, 20 bp, Actinomyces odontolyticus
atttagttggtcgtgtgcag

SEQ ID NO: 42646 - DNA, 20 bp, Paenibacillus glucanolyticus
cctctgaatctgctagagat

SEQ ID NO: 42647 - DNA, 20 bp, Dolosigranulum pigrum
cttgacatcttctgacaact

SEQ ID NO: 42648 - DNA, 20 bp, Actinomyces bovis
atacagagggcagcgaagca

SEQ ID NO: 42649 - DNA, 20 bp, Pasteurella multocida
tcttggccacctgccataag

SEQ ID NO: 42650 - DNA, 20 bp, Paenibacillus pabuli
cctgaagagaactggaaaga

SEQ ID NO: 42651 - DNA, 20 bp, Haemophilus actinomycetomicans
gcgtctaagttcggattgga

SEQ ID NO: 42652 - DNA, 20 bp, Bacillus pumilus
ggttcaaggatgaaagacgg

SEQ ID NO: 42653 - DNA, 20 bp, Collinsella aerofaciens
gtgtggggggacgatccccc

SEQ ID NO: 42654 - DNA, 20 bp, Fusobacterium mortiferum
tgtttagggtaaaactagtg

SEQ ID NO: 42655 - DNA, 20 bp, Virgibacillus pantothenticus
tccttcgggggtgacgcttg

SEQ ID NO: 42656 - DNA, 20 bp, Citrobacter freundii
cgtggtgattgacgttactc

SEQ ID NO: 42657 - DNA, 20 bp, Gemella bergeri
gagatcagtgctgcagcaaa

SEQ ID NO: 42658 - DNA, 20 bp, Bacteroides merdae
ggctcaaccataaaattgcc

SEQ ID NO: 42659 - DNA, 20 bp, Alcaligenes faecalis
ccgttaggccttagtagcgc

SEQ ID NO: 42660 - DNA, 20 bp, Rothia mucilaginosa
gaccaatctccgcatggggt

SEQ ID NO: 42661 - DNA, 20 bp, Pseudoramibacter alactolyticus
ttatggttttgtcgcatggc

SEQ ID NO: 42662 - DNA, 20 bp, Peptostreptococcus anaerobius
cggtgtttaatcacaccttc

SEQ ID NO: 42663 - DNA, 20 bp, Clostridium ramosum
tagagtgcaggagaggatcg

SEQ ID NO: 42664 - DNA, 20 bp, Clostridium ramosum
gaaggcgacgatctggcctg

SEQ ID NO: 42665 - DNA, 20 bp, Alloiococcus otitis
accgtggaacggcattggaa

SEQ ID NO: 42666 - DNA, 20 bp, Lactococcus lactis
agtttgaaagatgcaattgc

SEQ ID NO: 42667 - DNA, 20 bp, Streptococcus equinus
cagcatttaacacatgttag

SEQ ID NO: 42668 - DNA, 20 bp, Bacteroides stercoris
ggttatgctggggactctac

SEQ ID NO: 42669 - DNA, 20 bp, Acinetobacter genospecies 3
gctaattaagtcaaatgtga

SEQ ID NO: 42670 - DNA, 20 bp, Eggerthella lenta
agcagggaagaaattcgacg

SEQ ID NO: 42671 - DNA, 20 bp, Bacillus lentus
ttatctctccaggcggaaag

SEQ ID NO: 42672 - DNA, 20 bp, Alicyclobacillus acidocaldarius
ctccagcactcaagtcaagc

SEQ ID NO: 42673 - DNA, 20 bp, Anaerobiospirillum succiniciproducens
cagagataagagagtgcctt

SEQ ID NO: 42674 - DNA, 20 bp, Streptococcus bovis
gcaagtagaacgctgactac

SEQ ID NO: 42675 - DNA, 20 bp, Leuconostoc fallax
atgtgacggtaccataccag

SEQ ID NO: 42676 - DNA, 20 bp, Bordetella bronchiseptica
ctaatatcctgtgcaactga

SEQ ID NO: 42677 - DNA, 20 bp, Paenibacillus apiarius
gtttaaacctagggctcaac

SEQ ID NO: 42678 - DNA, 20 bp, Morganella morganii
tacaaagggaagcgaccccg

SEQ ID NO: 42679 - DNA, 20 bp, Moraxella lacunata
ctacaagccctgacgttacc

SEQ ID NO: 42680 - DNA, 20 bp, Streptococcus dysgalactiae
gcaccggttcaaggagttgc

SEQ ID NO: 42681 - DNA, 20 bp, Corynebacterium urealyticum
tctttagtgtggttggtgga

SEQ ID NO: 42682 - DNA, 20 bp, Listeria innocua
agagtgtggcgcatgccacg

SEQ ID NO: 42683 - DNA, 20 bp, Acinetobacter haemolyticus
caagtcgagcggggaagtgt

SEQ ID NO: 42684 - DNA, 20 bp, Bacillus mycoides
attttgaactgcatagttcg

SEQ ID NO: 42685 - DNA, 20 bp, Streptococcus thoraltensis
cgtaaagctctgttataagc

SEQ ID NO: 42686 - DNA, 20 bp, Clostridium sordellii
gtagtaagcttttggaactg

SEQ ID NO: 42687 - DNA, 20 bp, Pseudoramibacter alactolyticus
aactccggtgccataggatg

SEQ ID NO: 42688 - DNA, 20 bp, Eggerthella lenta
gaagaaattcgacggtacct

SEQ ID NO: 42689 - DNA, 20 bp, Capnocytophaga ochracea
gcgcgaatctataaagacgg

SEQ ID NO: 42690 - DNA, 20 bp, Anaerococcus prevotii
ccttagacattgggatagcc

SEQ ID NO: 42691 - DNA, 20 bp, Weissella paramesenteroides
actgttataagagaagaacg

SEQ ID NO: 42692 - DNA, 20 bp, Propionibacterium freudenreichii
actctgggcttgctttcgat

SEQ ID NO: 42693 - DNA, 20 bp, Propionibacterium freudenreichii
ctctgggcttgctttcgata

SEQ ID NO: 42694 - DNA, 20 bp, Shewanella algae
gaatttgcccatttgtgggg

SEQ ID NO: 42695 - DNA, 20 bp, Vibrio metschnikovii
cgtgaggaagggggtatcgt

SEQ ID NO: 42696 - DNA, 20 bp, Peptostreptococcus anaerobius
aggaagtcgtcgaaggtggc

SEQ ID NO: 42697 - DNA, 20 bp, Bacteroides capilosus
tgtaggcgggactgcaagtc

SEQ ID NO: 42698 - DNA, 20 bp, Actinomyces meyeri
cggagacgtgcgtgcatttg

SEQ ID NO: 42699 - DNA, 20 bp, Moraxella osloensis
agtcgaacgatgactctcta

SEQ ID NO: 42700 - DNA, 20 bp, Clostridium septicum
gcaagtacaacgagatgcaa

SEQ ID NO: 42701 - DNA, 20 bp, Propionibacterium freudenreichii
cgaatctcagaaagccggtt

SEQ ID NO: 42702 - DNA, 20 bp, Helcococcus kunzii
aagaatttcggtgaaagatg

SEQ ID NO: 42703 - DNA, 20 bp, Bacillus oleronius
tttcttcgcatgagggagaa

SEQ ID NO: 42704 - DNA, 20 bp, Streptococcus gordonii
ttataccgtagcttgctaca

SEQ ID NO: 42705 - DNA, 20 bp, Sporosarcina pasteurii
gacagcatagccgtctttca

SEQ ID NO: 42706 - DNA, 20 bp, Photobacterium damselae
attatttgacgttacctaca

SEQ ID NO: 42707 - DNA, 20 bp, Staphylococcus pulvereri
cggtggagtaaccttttatt

SEQ ID NO: 42708 - DNA, 20 bp, Clostridium ramosum
taaacttctgttataaagga

SEQ ID NO: 42709 - DNA, 20 bp, Corynebacterium glucuronolyticum
acaatggctggtacagtgcg

SEQ ID NO: 42710 - DNA, 20 bp, Staphylococcus capitis
cggataggacagctgtttag

SEQ ID NO: 42711 - DNA, 20 bp, Anaerococcus prevotii
cggtaccataagaaaaagcc

SEQ ID NO: 42712 - DNA, 20 bp, Prevotella melaninogenica
actgtgggataacctgccga

SEQ ID NO: 42713 - DNA, 20 bp, Vibrio cholerae
tatcgctgccctctgtatac

SEQ ID NO: 42714 - DNA, 20 bp, Prevotella melaninogenica
aggcagactaataccgcata

SEQ ID NO: 42715 - DNA, 20 bp, Chromobacterium violaceum
aatgcgtcggaatgtaccgt

SEQ ID NO: 42716 - DNA, 20 bp, Propionibacterium freudenreichii
cgggttggaaagctttatgc

SEQ ID NO: 42717 - DNA, 20 bp, Streptococcus infantarius
gttaaatgctgttatgcggt

SEQ ID NO: 42718 - DNA, 20 bp, Clostridium sordellii
ttttggaactgtaggacttg

SEQ ID NO: 42719 - DNA, 20 bp, Leuconostoc argentinum
catgatacaaagttgaaagg

SEQ ID NO: 42720 - DNA, 20 bp, Eggerthella lenta
cggcctctcaagcgggatct

SEQ ID NO: 42721 - DNA, 20 bp, Cardiobacterium hominis
ggttgcccaagtcagatgtg

SEQ ID NO: 42722 - DNA, 20 bp, Tetragenococcus halophilus
gaaatgctttttctatgacg

SEQ ID NO: 42723 - DNA, 20 bp, Delftia acidovorans
ggtcttcggacgctgacgag

SEQ ID NO: 42724 - DNA, 20 bp, Prevotella denticola
caaattgcatccaatcttga

SEQ ID NO: 42725 - DNA, 20 bp, Moraxella atlantae
tgagtaacatttaggaaact

SEQ ID NO: 42726 - DNA, 20 bp, Fusobacterium nucleatum
tatgattttagggcatccta

SEQ ID NO: 42727 - DNA, 20 bp, Corynebacterium afermentans
ccatgcggtcgcagctcgta

SEQ ID NO: 42728 - DNA, 20 bp, Bacteroides fragilis
gttttgtatgtattatatga

SEQ ID NO: 42729 - DNA, 20 bp, Clostridium tetani
tgtaggagggtccaaccttc

SEQ ID NO: 42730 - DNA, 20 bp, Anaerobiospirillum succiniciproducens
tctcctgggcaaatactgac

SEQ ID NO: 42731 - DNA, 20 bp, Vibrio cholerae
ttaacttaaccaccttcctc

SEQ ID NO: 42732 - DNA, 20 bp, Corynebacterium falsenii
tacagagggtcgcgataccg

SEQ ID NO: 42733 - DNA, 20 bp, Campylobacter sputorum
agtcatggcagtaatccacc

SEQ ID NO: 42734 - DNA, 20 bp, Methylobacterium mesophilicum
ttgacatggcgtgttatggg

SEQ ID NO: 42735 - DNA, 20 bp, Prevotella denticola
ccaaccacaagggacactac

SEQ ID NO: 42736 - DNA, 20 bp, Aerococcus viridans
ggtatcttatcagaaagcca

SEQ ID NO: 42737 - DNA, 20 bp, Prevotella melaninogenica
gtaggccggagattaagtgt

SEQ ID NO: 42738 - DNA, 20 bp, Aneurinibacillus thermoaerophilus
acctcccggtctgacggtac

SEQ ID NO: 42739 - DNA, 20 bp, Prevotella corporis
gggatgcgtccgattagctt

SEQ ID NO: 42740 - DNA, 20 bp, Paenibacillus larvae
caacctgtcacttacagatg

SEQ ID NO: 42741 - DNA, 20 bp, Veillonella dispar
aggattgacggtaccggaat

SEQ ID NO: 42742 - DNA, 20 bp, Corynebacterium accolens
acgaagctttgtgtgacggt

SEQ ID NO: 42743 - DNA, 20 bp, Enterococcus dispar
cttgaggatggacccgcggt

SEQ ID NO: 42744 - DNA, 20 bp, Tetragenococcus halophilus
gcgaatctctgaaagcttct

SEQ ID NO: 42745 - DNA, 20 bp, Prevotella oralis
acttttgatggcgaccggcg

SEQ ID NO: 42746 - DNA, 20 bp, Alcaligenes faecalis
tagctgttggggccgttagg

SEQ ID NO: 42747 - DNA, 20 bp, Corynebacterium group F
ataccggataggacaacttt

SEQ ID NO: 42748 - DNA, 20 bp, Streptococcus gordonii
gctacaccatagactgtgag

SEQ ID NO: 42749 - DNA, 20 bp, Porphyromonas endodontalis
agtctaagcgaaagcgataa

SEQ ID NO: 42750 - DNA, 20 bp, Corynebacterium jeikeium
tgggggttttatttacgatt

SEQ ID NO: 42751 - DNA, 20 bp, Veillonella dispar
agatgaaaggtggcctctat

SEQ ID NO: 42752 - DNA, 20 bp, Tissierella praeacuta
accatttggaggcagctgtc

SEQ ID NO: 42753 - DNA, 20 bp, Anaerococcus tetradius
tttctggtcatcatctgacg

SEQ ID NO: 42754 - DNA, 20 bp, Campylobacter lari
agttaatctgccctacacaa

SEQ ID NO: 42755 - DNA, 20 bp, Leptotrichia buccalis
aattcgtagatatgtgcagg

SEQ ID NO: 42756 - DNA, 20 bp, Photobacterium damselae
agcggcagcgacttaactga

SEQ ID NO: 42757 - DNA, 20 bp, Bacteroides uniformis
cagaaggcagctacacggcg

SEQ ID NO: 42758 - DNA, 20 bp, Bacteroides distasonis
gtaagcggcacagcgaaagc

SEQ ID NO: 42759 - DNA, 20 bp, Streptococcus parauberis
cgtggctcaaccatggttcg

SEQ ID NO: 42760 - DNA, 20 bp, Fusobacterium nucleatum
ttcaatagtgaaaggcggct

SEQ ID NO: 42761 - DNA, 20 bp, Clostridium clostridiiforme
gataacctgcctcacactgg

SEQ ID NO: 42762 - DNA, 20 bp, Pediococcus dextrinicus
tagcgccaatcctagagata

SEQ ID NO: 42763 - DNA, 20 bp, Clostridium ramosum
gacttatggcgcattagctg

SEQ ID NO: 42764 - DNA, 20 bp, Clostridium clostridiiforme
tgattgactgagtggcggac

SEQ ID NO: 42765 - DNA, 20 bp, Prevotella denticola
cgctcaacgtctgaattgca

SEQ ID NO: 42766 - DNA, 20 bp, Campylobacter sputorum
ctagagatagaagtttcccc

SEQ ID NO: 42767 - DNA, 20 bp, Neisseria subflava
actcgagtgtgtcagaggga

SEQ ID NO: 42768 - DNA, 20 bp, Gemella morbillorum
ttttctggtgcttgcactag

SEQ ID NO: 42769 - DNA, 20 bp, Facklamia languida
agcggctttctggtctgaaa

SEQ ID NO: 42770 - DNA, 20 bp, Methylobacterium extorquens
ctcgagagatcggggatcct

SEQ ID NO: 42771 - DNA, 20 bp, Gemella haemolysans
gattgtgtagtaactataca

SEQ ID NO: 42772 - DNA, 20 bp, Streptococcus hyovaginalis
attaatcatgagtcgcgaac

SEQ ID NO: 42773 - DNA, 20 bp, Campylobacter concisus
cagtggcctgtcaaagggag

SEQ ID NO: 42774 - DNA, 20 bp, Facklamia sourekii
gtgaggccaagcgaatctct

SEQ ID NO: 42775 - DNA, 20 bp, Clostridium cadaveris
taaaggatgcgtaggtggaa

SEQ ID NO: 42776 - DNA, 20 bp, Microbacterium hominis
tgagctgcgatcgcatggtc

SEQ ID NO: 42777 - DNA, 20 bp, Clostridium septicum
tcgagcgaggggagtttctt

SEQ ID NO: 42778 - DNA, 20 bp, Streptococcus alactolyticus
tgacatcccagtgaccgctc

SEQ ID NO: 42779 - DNA, 20 bp, Campylobacter curvus
tagtcttggcagtaatgcac

SEQ ID NO: 42780 - DNA, 20 bp, Clostridium ramosum
gtagaggatggacttatggc

SEQ ID NO: 42781 - DNA, 20 bp, Propionibacterium avidum
aagcttcggcggttttggat

SEQ ID NO: 42782 - DNA, 20 bp, Moraxella bovis
tcgaacgatgactatctagc

SEQ ID NO: 42783 - DNA, 20 bp, Peptostreptococcus anaerobius
catgataatatatatttacg

SEQ ID NO: 42784 - DNA, 20 bp, Vibrio hollisae
ccatgggagtggaatccgcc

SEQ ID NO: 42785 - DNA, 20 bp, Alicyclobacillus acidocaldarius
gctctccccgagcaacagag

SEQ ID NO: 42786 - DNA, 20 bp, Bacillus lentus
atttcctccgatacttgttc

SEQ ID NO: 42787 - DNA, 20 bp, Bacillus licheniformis
aagtcgagcggaccgacggg

SEQ ID NO: 42788 - DNA, 20 bp, Facklamia sourekii
agtcgtgaggccaagcgaat

SEQ ID NO: 42789 - DNA, 20 bp, Actinomyces bovis
ggaagagggaatgcttctta

SEQ ID NO: 42790 - DNA, 20 bp, Anaerococcus tetradius
ggtacgtaggcggcctagta

SEQ ID NO: 42791 - DNA, 20 bp, Campylobacter concisus
cgggcagacttgagtgcagt

SEQ ID NO: 42792 - DNA, 20 bp, Eggerthella lenta
agcgggatctctaatccgag

SEQ ID NO: 42793 - DNA, 20 bp, Facklamia hominis
acgtggagaacctacccttt

SEQ ID NO: 42794 - DNA, 20 bp, Clostridium subterminale
cgcataacataagagaatcg

SEQ ID NO: 42795 - DNA, 20 bp, Prevotella bivia
acatctgtgaaggtgctgca

SEQ ID NO: 42796 - DNA, 20 bp, Arcanobacterium bernardiae
ttgacatacactgcgatgtg

SEQ ID NO: 42797 - DNA, 20 bp, Actinomyces meyeri
ggttggtggaaagggttttt

SEQ ID NO: 42798 - DNA, 20 bp, Anaerococcus prevotii
gcaaacctcaaaaagtcttt

SEQ ID NO: 42799 - DNA, 20 bp, Listeria welshimeri
tgccacggctttgaaagatg

SEQ ID NO: 42800 - DNA, 20 bp, Bacillus sp
gttttgtgggatttgcttgg

SEQ ID NO: 42801 - DNA, 20 bp, Prevotella melaninogenica
tgtgttgtgaaatgtagacg

SEQ ID NO: 42802 - DNA, 20 bp, Clostridium clostridiiforme
gcataagcgcacagggccgc

SEQ ID NO: 42803 - DNA, 20 bp, Leptotrichia buccalis
caatctttaaagccggtcca

SEQ ID NO: 42804 - DNA, 20 bp, Prevotella melaninogenica
gaggggaaacggcattgagt

SEQ ID NO: 42805 - DNA, 20 bp, Campylobacter concisus
aatactggatacgacatgtc

SEQ ID NO: 42806 - DNA, 20 bp, Bacteroides uniformis
atagttcttccgcatggtag

SEQ ID NO: 42807 - DNA, 20 bp, Serratia marcescens
atacgctcatcaattgacgt

SEQ ID NO: 42808 - DNA, 20 bp, Facklamia hominis
ttagagaagaacgaccgcta

SEQ ID NO: 42809 - DNA, 20 bp, Neisseria polysaccharea
aaaggctgttgctaatatca

SEQ ID NO: 42810 - DNA, 20 bp, Corynebacterium group F
tgggcttgacatgtagcgga

SEQ ID NO: 42811 - DNA, 20 bp, Propionibacterium avidum
cagcaggggcgaagcttttg

SEQ ID NO: 42812 - DNA, 20 bp, Lactococcus garvieae
taagtgacggtatctaacca

SEQ ID NO: 42813 - DNA, 20 bp, Corynebacterium falsenii
gaaaggcccttgcttgcagg

SEQ ID NO: 42814 - DNA, 20 bp, Arcanobacterium bernardiae
tgtaaactcctttcagtaca

SEQ ID NO: 42815 - DNA, 20 bp, Corynebacterium afermentans
cagctactgaccatgcggtc

SEQ ID NO: 42816 - DNA, 20 bp, Streptococcus canis
caggtgcttgcactagtcta

SEQ ID NO: 42817 - DNA, 20 bp, Fusobacterium mortiferum
tactttgatgacggtacctt

SEQ ID NO: 42818 - DNA, 20 bp, Providencia rettgeri
ttgttccctagaggagtggc

SEQ ID NO: 42819 - DNA, 20 bp, Acinetobacter calcoaceticus
accttcagatagtggacgtt

SEQ ID NO: 42820 - DNA, 20 bp, Clostridium innocuum
ctaagtctgtagtaaaaggc

SEQ ID NO: 42821 - DNA, 20 bp, Pseudoramibacter alactolyticus
atccttcgggtgaaattaga

SEQ ID NO: 42822 - DNA, 20 bp, Neisseria subflava
gttgctaacatcagcggctg

SEQ ID NO: 42823 - DNA, 20 bp, Dolosigranulum pigrum
ctagcgccttgacggtatct

SEQ ID NO: 42824 - DNA, 20 bp, Leptotrichia buccalis
tgtgcccggcaatgaaaagt

SEQ ID NO: 42825 - DNA, 20 bp, Pasteurella multocida
gtgggaccttagggccacct

SEQ ID NO: 42826 - DNA, 20 bp, Granulicatella adiacens
ttgcactggtcaatctagtg

SEQ ID NO: 42827 - DNA, 20 bp, Leptotrichia buccalis
atgaagagtgtccgtgccga

SEQ ID NO: 42828 - DNA, 20 bp, Alicyclobacillus acidocaldarius
cgggcgttattccggcctga

SEQ ID NO: 42829 - DNA, 20 bp, Corynebacterium xerosis
gcaccgtgagggtgtggtgg

SEQ ID NO: 42830 - DNA, 20 bp, Paenibacillus larvae
gtgagctaataccggatagc

SEQ ID NO: 42831 - DNA, 20 bp, Bacillus sp
ataccggataatacgttttc

SEQ ID NO: 42832 - DNA, 20 bp, Helcococcus ovis
atctaactgacgctgaggta

SEQ ID NO: 42833 - DNA, 20 bp, Acinetobacter calcoaceticus
gaagttaataccttcagata

SEQ ID NO: 42834 - DNA, 20 bp, Haemophilus haemolyticus
ggtggcgaaactgcgaggtg

SEQ ID NO: 42835 - DNA, 20 bp, Clostridium cadaveris
tgtaggggtttcgatacctc

SEQ ID NO: 42836 - DNA, 20 bp, Bacteroides forsythus
gcatgtaccttgtgaataag

SEQ ID NO: 42837 - DNA, 20 bp, Bacillus schlegellii
gaaggcagcgcactggcctg

SEQ ID NO: 42838 - DNA, 20 bp, Lactococcus lactis
acgttggtgagagtggaaag

SEQ ID NO: 42839 - DNA, 20 bp, Bacillus fusiformis
ggcaacctaccttatagttt

SEQ ID NO: 42840 - DNA, 20 bp, Turicella otitidis
acactggatcgggctagaga

SEQ ID NO: 42841 - DNA, 20 bp, Proteus vulgaris
tacggaccaaagcaggggct

SEQ ID NO: 42842 - DNA, 20 bp, Leuconostoc pseudomesenteroides
cgaatgaaacttagtgtcgc

SEQ ID NO: 42843 - DNA, 20 bp, Streptococcus gallolyticus
agagacttgaaagatgcaat

SEQ ID NO: 42844 - DNA, 20 bp, Prevotella melaninogenica
ggataaagtcaatcacgtgt

SEQ ID NO: 42845 - DNA, 20 bp, Acinetobacter junii
caccttatcttagcggcgga

SEQ ID NO: 42846 - DNA, 20 bp, Pasteurella multocida
ggattgggctatatgcttgg

SEQ ID NO: 42847 - DNA, 20 bp, Bacillus schlegellii
ctgttgtcggggaagaaggg

SEQ ID NO: 42848 - DNA, 20 bp, Geobacillus thermoglucosidasius
cacggtgacggtacctaacg

SEQ ID NO: 42849 - DNA, 20 bp, Serratia marcescens
ggtggtgagcttaatacgct

SEQ ID NO: 42850 - DNA, 20 bp, Fusobacterium nucleatum
gacagagatgtttcagtgtc

SEQ ID NO: 42851 - DNA, 20 bp, Bacteroides distasonis
atcagagggggataacccgg

SEQ ID NO: 42852 - DNA, 20 bp, Gemella sanguinis
gggaagaatgattgtatagt

SEQ ID NO: 42853 - DNA, 20 bp, Pseudomonas fluorescens
tacgtgagtattttgacgtt

SEQ ID NO: 42854 - DNA, 20 bp, Gemella bergeri
aagacggtgacctaaccgaa

SEQ ID NO: 42855 - DNA, 20 bp, Pseudomonas luteola
gaagggttgtaacctaatac

SEQ ID NO: 42856 - DNA, 20 bp, Corynebacterium accolens
tagatgttgcatgacattta

SEQ ID NO: 42857 - DNA, 20 bp, Plesiomonas shigelloides
aatggcatatacaaagggcg

SEQ ID NO: 42858 - DNA, 20 bp, Paenibacillus amylolyticus
ggggagataatgaaagacgg

SEQ ID NO: 42859 - DNA, 20 bp, Bordetella bronchiseptica
aaagaaacggcacgggctaa

SEQ ID NO: 42860 - DNA, 20 bp, Tissierella praeacuta
atgcccctgaccgtcctaga

SEQ ID NO: 42861 - DNA, 20 bp, Fusobacterium varium
ttcgtgcctcttcggaggaa

SEQ ID NO: 42862 - DNA, 20 bp, Capnocytophaga gingivalis
gtttcagcttaactgagaaa

SEQ ID NO: 42863 - DNA, 20 bp, Corynebacterium amycolatum
accatggtgtggatgctgtg

SEQ ID NO: 42864 - DNA, 20 bp, Corynebacterium jeikeium
ctttgcttgcaaggggtact

SEQ ID NO: 42865 - DNA, 20 bp, Streptococcus infantarius
atttaacccatgttagatgc

SEQ ID NO: 42866 - DNA, 20 bp, Streptococcus ratti
taattattgcatgataattg

SEQ ID NO: 42867 - DNA, 20 bp, Moraxella osloensis
gctcattaagtcacatgtga

SEQ ID NO: 42868 - DNA, 20 bp, Campylobacter lari
ttagggaagaaccatgacgg

SEQ ID NO: 42869 - DNA, 20 bp, Bordetella bronchiseptica
ggaaagaaacggcacgggct

SEQ ID NO: 42870 - DNA, 20 bp, Granulicatella elegans
gagagcgaccggtgcttgca

SEQ ID NO: 42871 - DNA, 20 bp, Pasteurella multocida
tgggctatatgcttggtgcc

SEQ ID NO: 42872 - DNA, 20 bp, Peptostreptococcus anaerobius
tgggagtcggaaacacccga

SEQ ID NO: 42873 - DNA, 20 bp, Bacteroides fragilis
agcgtaggtggactggtaag

SEQ ID NO: 42874 - DNA, 20 bp, Bacteroides fragilis
tgattccgcatggtttcatt

SEQ ID NO: 42875 - DNA, 20 bp, Bacillus sp
gagcttgcttttgatcagtt

SEQ ID NO: 42876 - DNA, 20 bp, Clostridium butyricum
gtacaatgagatgcaacctc

SEQ ID NO: 42877 - DNA, 20 bp, Peptostreptococcus anaerobius
ttcaagtcggtggttaaagg

SEQ ID NO: 42878 - DNA, 20 bp, Pediococcus inopinatus
gcatggttttcttttaaaag

SEQ ID NO: 42879 - DNA, 20 bp, Peptostreptococcus anaerobius
taaagttctgttgcagggga

SEQ ID NO: 42880 - DNA, 20 bp, Streptococcus constellatus
gatgcaccgtagtttactac

SEQ ID NO: 42881 - DNA, 20 bp, Bacillus coagulans
taaaagcttgcttttaaaag

SEQ ID NO: 42882 - DNA, 20 bp, Dietzia maris
accgtagagatacggtcccc

SEQ ID NO: 42883 - DNA, 20 bp, Prevotella melaninogenica
gggataaagtcaatcacgtg

SEQ ID NO: 42884 - DNA, 20 bp, Lactococcus garvieae
ttatttaaaagaagcaattg

SEQ ID NO: 42885 - DNA, 20 bp, Rothia dentocariosa
gaccaatctctgcatggggt

SEQ ID NO: 42886 - DNA, 20 bp, Bacillus firmus
catgaggaaaagctgaaaga

SEQ ID NO: 42887 - DNA, 20 bp, Corynebacterium amycolatum
tgagggcgagctaatcccgc

SEQ ID NO: 42888 - DNA, 20 bp, Leptotrichia buccalis
gatagttcactggacggtaa

SEQ ID NO: 42889 - DNA, 20 bp, Paenibacillus amylolyticus
cgtccggtagagtaactgct

SEQ ID NO: 42890 - DNA, 20 bp, Clostridium botulinum
tgattttcttatcaaagatt

SEQ ID NO: 42891 - DNA, 20 bp, Paenibacillus thiaminolyticus
agggaagaacgctatggaga

SEQ ID NO: 42892 - DNA, 20 bp, Weeksella virosa
acaatgggttagcgcctgat

SEQ ID NO: 42893 - DNA, 20 bp, Weeksella virosa
tcctatcgcttaacgataga

SEQ ID NO: 42894 - DNA, 20 bp, Bacteroides distasonis
cctgaagtccgtaaccgaaa

SEQ ID NO: 42895 - DNA, 20 bp, Campylobacter sputorum
atgtatactggttgttgctg

SEQ ID NO: 42896 - DNA, 20 bp, Streptococcus gordonii
aagtagaacgcacagtttat

SEQ ID NO: 42897 - DNA, 20 bp, Prevotella loescheii
attcgatgatacgcgaggaa

SEQ ID NO: 42898 - DNA, 20 bp, Propionibacterium propionicus
caagttatgttggggactcg

SEQ ID NO: 42899 - DNA, 20 bp, Fusobacterium varium
cggatattatgactgagtcg

SEQ ID NO: 42900 - DNA, 20 bp, Clostridium glycolicum
agcttgacatccttttgacc

SEQ ID NO: 42901 - DNA, 20 bp, Bacteroides distasonis
accacgtctcagttcggatc

SEQ ID NO: 42902 - DNA, 20 bp, Peptostreptococcus anaerobius
tggttaaaggctacggctca

SEQ ID NO: 42903 - DNA, 20 bp, Streptococcus parasanguinis
accgcataaaagtcgacatt

SEQ ID NO: 42904 - DNA, 20 bp, Chromobacterium violaceum
tgtaccgtgtaatgggggat

SEQ ID NO: 42905 - DNA, 20 bp, Haemophilus haemolyticus
gtggcgaaactgcgaggtgg

SEQ ID NO: 42906 - DNA, 20 bp, Clostridium subterminale
aacttataaaaccaatccca

SEQ ID NO: 42907 - DNA, 20 bp, Pseudomonas fluorescens
tgagtattttgacgttaccg

SEQ ID NO: 42908 - DNA, 20 bp, Campylobacter concisus
ctatcaaagccggtcgtagt

SEQ ID NO: 42909 - DNA, 20 bp, Finegoldia magna
gcctatgacagtgggatagc

SEQ ID NO: 42910 - DNA, 20 bp, Clostridium innocuum
tactacaatggcgaccacaa

SEQ ID NO: 42911 - DNA, 20 bp, Acinetobacter lwoffii
actctagttaatacctaggg

SEQ ID NO: 42912 - DNA, 20 bp, Propionibacterium freudenreichii
tggaagcgttcagagatggg

SEQ ID NO: 42913 - DNA, 20 bp, Leuconostoc lactis
ataccgcataaaacctaaca

SEQ ID NO: 42914 - DNA, 20 bp, Paenibacillus thiaminolyticus
ctatggagagtaactgttcc

SEQ ID NO: 42915 - DNA, 20 bp, Brochothrix campestris
tggggataacatcgagaaat

SEQ ID NO: 42916 - DNA, 20 bp, Tetragenococcus halophilus
tggctggtcccgcggtgcat

SEQ ID NO: 42917 - DNA, 20 bp, Streptococcus dysgalactiae
ggaaaatccaccatgtgacg

SEQ ID NO: 42918 - DNA, 20 bp, Geobacillus thermoglucosidasius
ttgcttccgcttggttagcg

SEQ ID NO: 42919 - DNA, 20 bp, Staphylococcus lentus
caatgttgaaagacggtttc

SEQ ID NO: 42920 - DNA, 20 bp, Clostridium butyricum
gaggaagccacttcggtggc

SEQ ID NO: 42921 - DNA, 20 bp, Arcanobacterium bernardiae
tttggttgagggtatgtgca

SEQ ID NO: 42922 - DNA, 20 bp, Prevotella intermedia
aggcggtctgttaagcgtgt

SEQ ID NO: 42923 - DNA, 20 bp, Facklamia ignava
ttatcagagaagaatagcct

SEQ ID NO: 42924 - DNA, 20 bp, Abiotrophia defectiva
taactgttatgcgtgtgacg

SEQ ID NO: 42925 - DNA, 20 bp, Bacteroides fragilis
actggtaagtcagttgtgaa

SEQ ID NO: 42926 - DNA, 20 bp, Streptococcus suis
cactagacggatgagttgcg

SEQ ID NO: 42927 - DNA, 20 bp, Clostridium innocuum
tccgggataactgctggaaa

SEQ ID NO: 42928 - DNA, 20 bp, Kingella kingae
cggccaataactgattagct

SEQ ID NO: 42929 - DNA, 20 bp, Chromobacterium violaceum
atgggagtgagtttcaccag

SEQ ID NO: 42930 - DNA, 20 bp, Clostridium botulinum
catgattttcttatcaaaga

SEQ ID NO: 42931 - DNA, 20 bp, Bacillus lentus
aggcggaaagataatctatc

SEQ ID NO: 42932 - DNA, 20 bp, Actinomyces bovis
gtaagggaagaacgatagga

SEQ ID NO: 42933 - DNA, 20 bp, Facklamia ignava
tcagcgggggataaccatcg

SEQ ID NO: 42934 - DNA, 20 bp, Peptostreptococcus anaerobius
accgcaaggaggaagtcgtc

SEQ ID NO: 42935 - DNA, 20 bp, Alcaligenes faecalis
tcgaacggcagcgcgagaga

SEQ ID NO: 42936 - DNA, 20 bp, Leptotrichia buccalis
gggtgtgggcatgaagagtg

SEQ ID NO: 42937 - DNA, 20 bp, Cardiobacterium hominis
tcgatactgacgctcatgtg

SEQ ID NO: 42938 - DNA, 20 bp, Prevotella melaninogenica
tacctggtatcagcggctaa

SEQ ID NO: 42939 - DNA, 20 bp, Clostridium innocuum
gtcagtaatacccgaagccg

SEQ ID NO: 42940 - DNA, 20 bp, Virgibacillus pantothenticus
gacgcccctagagataggga

SEQ ID NO: 42941 - DNA, 20 bp, Veillonella parvula
cgaaaggccttcttgcgaac

SEQ ID NO: 42942 - DNA, 20 bp, Gemella haemolysans
tggttgatgtttaaaagttg

SEQ ID NO: 42943 - DNA, 20 bp, Gemella bergeri
tatacacaaaacagacggta

SEQ ID NO: 42944 - DNA, 20 bp, Corynebacterium ulcerans
caagatcggcgtagagatac

SEQ ID NO: 42945 - DNA, 20 bp, Granulicatella elegans
gagatagagcattcccttcg

SEQ ID NO: 42946 - DNA, 20 bp, Abiotrophia defectiva
gagtaactgttatgcgtgtg

SEQ ID NO: 42947 - DNA, 20 bp, Kocuria kristinae
gttcttcccttttgggctgg

SEQ ID NO: 42948 - DNA, 20 bp, Streptococcus thoraltensis
tcacttaaagatggacctgc

SEQ ID NO: 42949 - DNA, 20 bp, Bacteroides thetaiotaomicron
ttgcatttgaatattttgga

SEQ ID NO: 42950 - DNA, 20 bp, Brochothrix campestris
gcaagtcgaacgaacggata

SEQ ID NO: 42951 - DNA, 20 bp, Clostridium innocuum
aaaaagacttagtggcgaac

SEQ ID NO: 42952 - DNA, 20 bp, Bacillus sp
gagagagattgaaagatggc

SEQ ID NO: 42953 - DNA, 20 bp, Fusobacterium mortiferum
tgccctgcagtctgggacaa

SEQ ID NO: 42954 - DNA, 20 bp, Leuconostoc argentinum
aactggttaacttgagtgtt

SEQ ID NO: 42955 - DNA, 20 bp, Bacteroides eggerthii
cacagtcagcggccaagcga

SEQ ID NO: 42956 - DNA, 20 bp, Anaerococcus tetradius
tacggagggaattagagata

SEQ ID NO: 42957 - DNA, 20 bp, Gemella haemolysans
ctaagtgttggtctcataag

SEQ ID NO: 42958 - DNA, 20 bp, Moraxella bovis
ttgctagatatgattagtgg

SEQ ID NO: 42959 - DNA, 20 bp, Helcococcus ovis
gtaaagttctgtccttagtg

SEQ ID NO: 42960 - DNA, 20 bp, Campylobacter concisus
ggtacaacgcgcatgcgagc

SEQ ID NO: 42961 - DNA, 20 bp, Cardiobacterium hominis
cgactagagtatgaaagagg

SEQ ID NO: 42962 - DNA, 20 bp, Bacteroides merdae
ggatctatggtttgtaaact

SEQ ID NO: 42963 - DNA, 20 bp, Delftia acidovorans
agaggcccatgacggtaccg

SEQ ID NO: 42964 - DNA, 20 bp, Peptoniphilus indolicus
acgatcaaagtgaattagcg

SEQ ID NO: 42965 - DNA, 20 bp, Weeksella virosa
tgcaagccgagcggtagatt

SEQ ID NO: 42966 - DNA, 20 bp, Staphylococcus sp.
ctatcgaaccatgcggttcg

SEQ ID NO: 42967 - DNA, 20 bp, Micrococcus luteus
gcgcccaccgcatggtgggt

SEQ ID NO: 42968 - DNA, 20 bp, Paenibacillus glucanolyticus
ttgacatccctctgaatctg

SEQ ID NO: 42969 - DNA, 20 bp, Geobacillus thermoglucosidasius
gagacagggcgttcctccct

SEQ ID NO: 42970 - DNA, 20 bp, Methylobacterium mesophilicum
ttgcaccgcagtagcgcagc

SEQ ID NO: 42971 - DNA, 20 bp, Peptostreptococcus anaerobius
ttgacatcccttagaccggt

SEQ ID NO: 42972 - DNA, 20 bp, Anaerococcus prevotii
gtagcttaactactgtaagc

SEQ ID NO: 42973 - DNA, 20 bp, Campylobacter concisus
agtggcctgtcaaagggagc

SEQ ID NO: 42974 - DNA, 20 bp, Moraxella  catarrhalis
tatggttaatacccataagc

SEQ ID NO: 42975 - DNA, 20 bp, Bacteroides fragilis
tcgtaaacttcttttatata

SEQ ID NO: 42976 - DNA, 20 bp, Pseudoramibacter alactolyticus
cccgaagcctgtgagagaac

SEQ ID NO: 42977 - DNA, 20 bp, Peptostreptococcus anaerobius
ttctgttgcaggggaagata

SEQ ID NO: 42978 - DNA, 20 bp, Streptococcus constellatus
tagaacgcacaggatgcacc

SEQ ID NO: 42979 - DNA, 20 bp, Bacillus simplex
aagtaccagagtaactgctg

SEQ ID NO: 42980 - DNA, 20 bp, Streptococcus constellatus
aagtagaacgcacaggatgc

SEQ ID NO: 42981 - DNA, 20 bp, Peptostreptococcus anaerobius
acatggataacatactgaaa

SEQ ID NO: 42982 - DNA, 20 bp, Propionibacterium propionicus
aagcttttttgtgacggtag

SEQ ID NO: 42983 - DNA, 20 bp, Alloiococcus otitis
cgtggaacggcattggaaac

SEQ ID NO: 42984 - DNA, 20 bp, Clostridium botulinum
atgattttcttatcaaagat

SEQ ID NO: 42985 - DNA, 20 bp, Eschericchia vulneris
tctcctcgggtgacgagtgg

SEQ ID NO: 42986 - DNA, 20 bp, Propionibacterium freudenreichii
ttccagggcttaactctggg

SEQ ID NO: 42987 - DNA, 20 bp, Leuconostoc pseudomesenteroides
tgtcgcatgacacaaagtta

SEQ ID NO: 42988 - DNA, 20 bp, Streptococcus hyovaginalis
cacatgttaatgatttaaaa

SEQ ID NO: 42989 - DNA, 20 bp, Anaerococcus tetradius
tatagctcaactatagtaag

SEQ ID NO: 42990 - DNA, 20 bp, Prevotella bivia
aataaagatttatcggttat

SEQ ID NO: 42991 - DNA, 20 bp, Alicyclobacillus acidocaldarius
agctttacaacccgaaggcc

SEQ ID NO: 42992 - DNA, 20 bp, Paenibacillus amylolyticus
gtccggtagagtaactgcta

SEQ ID NO: 42993 - DNA, 20 bp, Paenibacillus macerans
gcaatctgtcacttagagat

SEQ ID NO: 42994 - DNA, 20 bp, Cardiobacterium hominis
gaaggcagctttctgggtcg

SEQ ID NO: 42995 - DNA, 20 bp, Corynebacterium falsenii
aaggcccttgcttgcagggg

SEQ ID NO: 42996 - DNA, 20 bp, Propionibacterium avidum
cgttcactgttgccagcacg

SEQ ID NO: 42997 - DNA, 20 bp, Bacillus alcalophilus
aaaggaatcacatggttctt

SEQ ID NO: 42998 - DNA, 20 bp, Wolinella succinogenes
cattcaaccaaaggagcaat

SEQ ID NO: 42999 - DNA, 20 bp, Clostridium butyricum
ggtacaatgagatgcaacct

SEQ ID NO: 43000 - DNA, 20 bp, Neisseria gonorrhoeae
ggaagcttgcttctcgggtg

SEQ ID NO: 43001 - DNA, 20 bp, Bacteroides thetaiotaomicron
acctgccgataactcgggga

SEQ ID NO: 43002 - DNA, 20 bp, Haemophilus segnis
aagcgagagtgcgagctgga

SEQ ID NO: 43003 - DNA, 20 bp, Gemella haemolysans
attgtgttgttctgaccttt

SEQ ID NO: 43004 - DNA, 20 bp, Brevibacterium epidermidis
gaagccggtgtcccaaccct

SEQ ID NO: 43005 - DNA, 20 bp, Bacillus lentus
accggcatttcctccgatac

SEQ ID NO: 43006 - DNA, 20 bp, Serratia marcescens
tgagcttaatacgctcatca

SEQ ID NO: 43007 - DNA, 20 bp, Proteus vulgaris
ctgaaactggttggctagag

SEQ ID NO: 43008 - DNA, 20 bp, Helcococcus ovis
tatagtttcttcggaaactt

SEQ ID NO: 43009 - DNA, 20 bp, Moraxella lacunata
tctcttgaagacttagtgac

SEQ ID NO: 43010 - DNA, 20 bp, Methylobacterium mesophilicum
cgtgttatggggagagattc

SEQ ID NO: 43011 - DNA, 20 bp, Facklamia ignava
gcggtgcattagctagacgg

SEQ ID NO: 43012 - DNA, 20 bp, Bacillus schlegellii
gtctgctgtgaaaggccacg

SEQ ID NO: 43013 - DNA, 20 bp, Alcaligenes faecalis
ctgacggtatctgcagaata

SEQ ID NO: 43014 - DNA, 20 bp, Lactococcus garvieae
gagggcgcttcctaaggtaa

SEQ ID NO: 43015 - DNA, 20 bp, Clostridium clostridiiforme
aaactgttttgctagagtgt

SEQ ID NO: 43016 - DNA, 20 bp, Corynebacterium auris
cgtgtgcgatactgtgaggt

SEQ ID NO: 43017 - DNA, 20 bp, Facklamia ignava
ctggcgcaaacgcaataaac

SEQ ID NO: 43018 - DNA, 20 bp, Corynebacterium group F
ggataggacaactttttgga

SEQ ID NO: 43019 - DNA, 20 bp, Bacteroides uniformis
cacggcgacgtgatgctaat

SEQ ID NO: 43020 - DNA, 20 bp, Paenibacillus thiaminolyticus
atcgggaaaggcggagcaat

SEQ ID NO: 43021 - DNA, 20 bp, Burkholderia gladioli
gctaatatccttcggggatg

SEQ ID NO: 43022 - DNA, 20 bp, Prevotella loescheii
gcccaccgtggctacgatcg

SEQ ID NO: 43023 - DNA, 20 bp, Tissierella praeacuta
aagatgctaatctcttaaag

SEQ ID NO: 43024 - DNA, 20 bp, Chromobacterium violaceum
agctgttgggggtttgaatc

SEQ ID NO: 43025 - DNA, 20 bp, Morganella morganii
gggcctcgcaccatcagatg

SEQ ID NO: 43026 - DNA, 20 bp, Helcococcus ovis
aggcgactttctggaatcta

SEQ ID NO: 43027 - DNA, 20 bp, Prevotella intermedia
caagtcctacagttccaaaa

SEQ ID NO: 43028 - DNA, 20 bp, Leuconostoc pseudomesenteroides
aatgaaacttagtgtcgcat

SEQ ID NO: 43029 - DNA, 20 bp, Prevotella loescheii
acgatgaggcccttcggggc

SEQ ID NO: 43030 - DNA, 20 bp, Streptococcus macacae
gagagagtggaaagttctcc

SEQ ID NO: 43031 - DNA, 20 bp, Oligella urethralis
attagcctaagacttttctt

SEQ ID NO: 43032 - DNA, 20 bp, Bacillus cereus
cattttgaactgcatggttc

SEQ ID NO: 43033 - DNA, 20 bp, Neisseria subflava
tcagggaagaaaaggatagg

SEQ ID NO: 43034 - DNA, 20 bp, Porphyromonas endodontalis
tgtagtcttgccgttgaaac

SEQ ID NO: 43035 - DNA, 20 bp, Bacillus oleronius
accggataacttttttcttc

SEQ ID NO: 43036 - DNA, 20 bp, Pediococcus pentosaceus
ttttaaaagatggctctgct

SEQ ID NO: 43037 - DNA, 20 bp, Helcococcus ovis
tgtggctcaaccatagtaag

SEQ ID NO: 43038 - DNA, 20 bp, Facklamia sourekii
cacccctcagtgctggcgtt

SEQ ID NO: 43039 - DNA, 20 bp, Dermabacter hominis
aaactcgaggcttaaccttg

SEQ ID NO: 43040 - DNA, 20 bp, Streptococcus anginosus
ggttagaaaagtctgaagtg

SEQ ID NO: 43041 - DNA, 20 bp, Veillonella dispar
gacgaaaggccttcttgcga

SEQ ID NO: 43042 - DNA, 20 bp, Abiotrophia defectiva
gatagagtttttcttcggaa

SEQ ID NO: 43043 - DNA, 20 bp, Anaerococcus tetradius
aagagcgatctgaagcgaaa

SEQ ID NO: 43044 - DNA, 20 bp, Staphylococcus saccharolyticus
ctaacctcggcatcgaggat

SEQ ID NO: 43045 - DNA, 20 bp, Clostridium ramosum
taacctgccctagacagggg

SEQ ID NO: 43046 - DNA, 20 bp, Streptococcus infantarius
cttcaaactttagcaagcta

SEQ ID NO: 43047 - DNA, 20 bp, Chryseobacterium meningosepticum
gagggcagctacctagcgat

SEQ ID NO: 43048 - DNA, 20 bp, Moraxella lacunata
gggtctcttgaagacttagt

SEQ ID NO: 43049 - DNA, 20 bp, Streptococcus canis
aaaacccattatgtgacggt

SEQ ID NO: 43050 - DNA, 20 bp, Enterobacter sakazakii
ggccattgacgttactcgca

SEQ ID NO: 43051 - DNA, 20 bp, Bacteroides thetaiotaomicron
gtggacagttaagtcagttg

SEQ ID NO: 43052 - DNA, 20 bp, Chryseobacterium meningosepticum
taaacgatgattactcgttt

SEQ ID NO: 43053 - DNA, 20 bp, Neisseria gonorrhoeae
cgcaaggagtccgcttacca

SEQ ID NO: 43054 - DNA, 20 bp, Campylobacter sputorum
tagatggacctgcgccgtat

SEQ ID NO: 43055 - DNA, 20 bp, Peptostreptococcus anaerobius
atttacggcatcgtagatat

SEQ ID NO: 43056 - DNA, 20 bp, Alicyclobacillus acidocaldarius
gaagatgcctcctcgcgggc

SEQ ID NO: 43057 - DNA, 20 bp, Aerococcus christensenii
ggctctgctatcacttatcg

SEQ ID NO: 43058 - DNA, 20 bp, Streptococcus hyointestinalis
gctaataccgcataagaggt

SEQ ID NO: 43059 - DNA, 20 bp, Brevibacillus agri
aaagaaaagatggcttttcg

SEQ ID NO: 43060 - DNA, 20 bp, Actinomyces neuii
attggtgtctacagagggtt

SEQ ID NO: 43061 - DNA, 20 bp, Bacillus pallidus
tcgcggctcaaccgcgagcg

SEQ ID NO: 43062 - DNA, 20 bp, Corynebacterium jeikeium
gggcataactagagtgctgt

SEQ ID NO: 43063 - DNA, 20 bp, Oligella urethralis
aggtattagcctaagacttt

SEQ ID NO: 43064 - DNA, 20 bp, Proteus penneri
ctttatcaattgacgttacc

SEQ ID NO: 43065 - DNA, 20 bp, Myroides odoratus
gttttcggactgagtggcta

SEQ ID NO: 43066 - DNA, 20 bp, Corynebacterium group F
cgtttgctaccttgtgaggg

SEQ ID NO: 43067 - DNA, 20 bp, Acinetobacter junii
gactaatactcttggatagt

SEQ ID NO: 43068 - DNA, 20 bp, Facklamia sourekii
taggtgaaatcctacgggac

SEQ ID NO: 43069 - DNA, 20 bp, Paenibacillus macerans
agactgggataacattcgga

SEQ ID NO: 43070 - DNA, 20 bp, Alicyclobacillus acidocaldarius
cgcaagaagatgcctcctcg

SEQ ID NO: 43071 - DNA, 20 bp, Bacillus lentus
gctcatgcgtcgccgcttcg

SEQ ID NO: 43072 - DNA, 20 bp, Prevotella intermedia
cattctggacgtcgaccggc

SEQ ID NO: 43073 - DNA, 20 bp, Granulicatella adiacens
ggatgctaaaaccgcatagg

SEQ ID NO: 43074 - DNA, 20 bp, Acinetobacter johnsonii
cttggattaatactctagga

SEQ ID NO: 43075 - DNA, 20 bp, Actinomyces viscosus
atggtgggcctgggaaaggt

SEQ ID NO: 43076 - DNA, 20 bp, Listeria innocua
gaatgatagagtgtggcgca

SEQ ID NO: 43077 - DNA, 20 bp, Pseudomonas luteola
aggaagggttgtaacctaat

SEQ ID NO: 43078 - DNA, 20 bp, Corynebacterium group F
tgtaagtccacagcttaact

SEQ ID NO: 43079 - DNA, 20 bp, Bacillus simplex
ccggatacgttcttttctcg

SEQ ID NO: 43080 - DNA, 20 bp, Bacillus fusiformis
gctgtcgctataggatgggc

SEQ ID NO: 43081 - DNA, 20 bp, Veillonella dispar
acgaaaggccttcttgcgaa

SEQ ID NO: 43082 - DNA, 20 bp, Paenibacillus validus
gcaagtcgagcggccctttc

SEQ ID NO: 43083 - DNA, 20 bp, Helcococcus ovis
agtgctagttgtcgggagtc

SEQ ID NO: 43084 - DNA, 20 bp, Brevibacterium epidermidis
ctctttggagctggtgtaca

SEQ ID NO: 43085 - DNA, 20 bp, Paenibacillus apiarius
taagttgggtgtttaaacct

SEQ ID NO: 43086 - DNA, 20 bp, Paenibacillus validus
cggatagctggtttctccgc

SEQ ID NO: 43087 - DNA, 20 bp, Paenibacillus validus
atgggggaatcatgaaacac

SEQ ID NO: 43088 - DNA, 20 bp, Veillonella atypica
tagtctgtcttaaaagttcg

SEQ ID NO: 43089 - DNA, 20 bp, Kocuria varians
gtaacaaggcagccgtaccg

SEQ ID NO: 43090 - DNA, 20 bp, Staphylococcus pulvereri
ccttttattaggagctagcc

SEQ ID NO: 43091 - DNA, 20 bp, Helcococcus ovis
tatcgcatgataattaagtt

SEQ ID NO: 43092 - DNA, 20 bp, Bacillus sp
cgaagccgtgaggccaagca

SEQ ID NO: 43093 - DNA, 20 bp, Streptococcus pyogenes
gagaactggtgcttgcaccg

SEQ ID NO: 43094 - DNA, 20 bp, Bacillus flexus
ctgattagaagcttgcttct

SEQ ID NO: 43095 - DNA, 20 bp, Prevotella bivia
gggacatctgtgaaggtgct

SEQ ID NO: 43096 - DNA, 20 bp, Erysipelothrix rhusiopathiae
ttaagtcgtacaaggtaacc

SEQ ID NO: 43097 - DNA, 20 bp, Peptostreptococcus anaerobius
aacatactgaaaagtttact

SEQ ID NO: 43098 - DNA, 20 bp, Proteus vulgaris
ttaatactcttagcaattga

SEQ ID NO: 43099 - DNA, 20 bp, Chromobacterium violaceum
cagggtgcttgcaccgctga

SEQ ID NO: 43100 - DNA, 20 bp, Haemophilus ducreyi
ggtgatgaggaaggcagttt

SEQ ID NO: 43101 - DNA, 20 bp, Propionibacterium acnes
taaaccgctttcgcctgtga

SEQ ID NO: 43102 - DNA, 20 bp, Bacteroides distasonis
taagcggcacagcgaaagcg

SEQ ID NO: 43103 - DNA, 20 bp, Acinetobacter baumannii
ctggacctagcggcggacgg

SEQ ID NO: 43104 - DNA, 20 bp, Bacteroides thetaiotaomicron
gcgtaggtggacagttaagt

SEQ ID NO: 43105 - DNA, 20 bp, Brevibacillus agri
ttttcgctatcactgggaga

SEQ ID NO: 43106 - DNA, 20 bp, Campylobacter lari
ttgttagggaagaaccatga

SEQ ID NO: 43107 - DNA, 20 bp, Pasteurella trehalosi
tgtttaatagacaaagcaat

SEQ ID NO: 43108 - DNA, 20 bp, Actinomyces radingae
aggcttgacatgcgccctga

SEQ ID NO: 43109 - DNA, 20 bp, Anaerococcus prevotii
cacaccatggaagcttgtaa

SEQ ID NO: 43110 - DNA, 20 bp, Arthrobacter globiformis
cttgacatgttcctgaccgc

SEQ ID NO: 43111 - DNA, 20 bp, Moraxella osloensis
ttaagcagggaggagaggct

SEQ ID NO: 43112 - DNA, 20 bp, Myroides odoratus
cttttgtacgggaagaaatg

SEQ ID NO: 43113 - DNA, 20 bp, Campylobacter concisus
gcatgcgagcctgtgagggt

SEQ ID NO: 43114 - DNA, 20 bp, Peptostreptococcus anaerobius
agccgattatccaaccgcaa

SEQ ID NO: 43115 - DNA, 20 bp, Empedobacter brevis
cgcgtatgcaacttgcccta

SEQ ID NO: 43116 - DNA, 20 bp, Streptococcus dysgalactiae
gaaaatccaccatgtgacgg

SEQ ID NO: 43117 - DNA, 20 bp, Pasteurella multocida
tgttaaatagatagcatcat

SEQ ID NO: 43118 - DNA, 20 bp, Clostridium tetani
agcttaacttaggggctgca

SEQ ID NO: 43119 - DNA, 20 bp, Paenibacillus lautus
ggagagtgacggtacttgag

SEQ ID NO: 43120 - DNA, 20 bp, Myroides odoratus
agctgttcggttttcggact

SEQ ID NO: 43121 - DNA, 20 bp, Vibrio cholerae
cctgctttgctcttgcgagg

SEQ ID NO: 43122 - DNA, 20 bp, Corynebacterium group ANF
gcccccaacttgggtataag

SEQ ID NO: 43123 - DNA, 20 bp, Streptococcus infantis
gctcttctggatgagttgcg

SEQ ID NO: 43124 - DNA, 20 bp, Streptococcus constellatus
cccgtattctgtgagttgcg

SEQ ID NO: 43125 - DNA, 20 bp, Campylobacter sputorum
tgggatgaggctatattgta

SEQ ID NO: 43126 - DNA, 20 bp, Clostridium glycolicum
gtcgtgaggccgagctaatc

SEQ ID NO: 43127 - DNA, 20 bp, Prevotella intermedia
tcccttcggggcgtctgtga

SEQ ID NO: 43128 - DNA, 20 bp, Prevotella loescheii
aattcgatgatacgcgagga

SEQ ID NO: 43129 - DNA, 20 bp, Bacteroides fragilis
agtgcagtatgtatactgtt

SEQ ID NO: 43130 - DNA, 20 bp, Bacteroides vulgatus
cgatatacagcaagcggcca

SEQ ID NO: 43131 - DNA, 20 bp, Staphylococcus aureus
gtggttaattcgaagcaacg

SEQ ID NO: 43132 - DNA, 20 bp, Bacteroides forsythus
tggcgggactgccggcgtaa

SEQ ID NO: 43133 - DNA, 20 bp, Staphylococcus carnosus
tctgcaatgaaagacggttt

SEQ ID NO: 43134 - DNA, 20 bp, Methylobacterium mesophilicum
ccagctgttggggtgcttgc

SEQ ID NO: 43135 - DNA, 20 bp, Clostridium tetani
cggtacagagagacgcaaga

SEQ ID NO: 43136 - DNA, 20 bp, Anaerococcus prevotii
accagggcttgacatactga

SEQ ID NO: 43137 - DNA, 20 bp, Prevotella intermedia
tggcgttagcggctaagcga

SEQ ID NO: 43138 - DNA, 20 bp, Brevibacillus choshinensis
ttggtcacgtacagatgggc

SEQ ID NO: 43139 - DNA, 20 bp, Clostridium septicum
attgcagcttcgcatggagc

SEQ ID NO: 43140 - DNA, 20 bp, Chromobacterium violaceum
tgaatccttggtagcgtagc

SEQ ID NO: 43141 - DNA, 20 bp, Prevotella melaninogenica
aggccggagattaagtgtgt

SEQ ID NO: 43142 - DNA, 20 bp, Actinomyces meyeri
aatactggatattcactggt

SEQ ID NO: 43143 - DNA, 20 bp, Paenibacillus pabuli
ctgtgaagccgcgaggtgga

SEQ ID NO: 43144 - DNA, 20 bp, Anaerococcus prevotii
caaaaagtctttcccagttc

SEQ ID NO: 43145 - DNA, 20 bp, Campylobacter rectus
tttcttgggaaagaattatg

SEQ ID NO: 43146 - DNA, 20 bp, Paenibacillus validus
ggcaacctgtggcttacgga

SEQ ID NO: 43147 - DNA, 20 bp, Staphylococcus pulvereri
agtaaccttttattaggagc

SEQ ID NO: 43148 - DNA, 20 bp, Corynebacterium glucuronolyticum
cgtttttgtgacggtacctg

SEQ ID NO: 43149 - DNA, 20 bp, Alicyclobacillus acidocaldarius
tttccaaagccatcccatgg

SEQ ID NO: 43150 - DNA, 20 bp, Pseudomonas fluorescens
tacttacctaatacgtgagt

SEQ ID NO: 43151 - DNA, 20 bp, Clostridium glycolicum
gccgagctaatcccttaaag

SEQ ID NO: 43152 - DNA, 20 bp, Leuconostoc lactis
tgttgttggagaagaatgta

SEQ ID NO: 43153 - DNA, 20 bp, Paenibacillus thiaminolyticus
cagggaagaacgctatggag

SEQ ID NO: 43154 - DNA, 20 bp, Aerococcus viridans
ggaagaagattgaaagacgg

SEQ ID NO: 43155 - DNA, 20 bp, Staphylococcus auricularis
aatgcgtaagtaactgtgcg

SEQ ID NO: 43156 - DNA, 20 bp, Tissierella praeacuta
agttctgtcctaagggacga

SEQ ID NO: 43157 - DNA, 20 bp, Corynebacterium falsenii
atgcaggatcgctgcagaga

SEQ ID NO: 43158 - DNA, 20 bp, Paenibacillus apiarius
tcacttgcagatggacctgc

SEQ ID NO: 43159 - DNA, 20 bp, Aeromonas hydrophila
aaggttggtggctaataccc

SEQ ID NO: 43160 - DNA, 20 bp, Clostridium botulinum
ctgttttctaggacgataat

SEQ ID NO: 43161 - DNA, 20 bp, Clostridium botulinum
gagaatcgcatgattttctt

SEQ ID NO: 43162 - DNA, 20 bp, Ewingella americana
tgtgggcttgacccgtggct

SEQ ID NO: 43163 - DNA, 20 bp, Prevotella intermedia
taccccgttgaaagacggcc

SEQ ID NO: 43164 - DNA, 20 bp, Propionibacterium freudenreichii
ggggagaatggaactctcgg

SEQ ID NO: 43165 - DNA, 20 bp, Corynebacterium hoagii
gggttggaaaggtttactgg

SEQ ID NO: 43166 - DNA, 20 bp, Bacteroides thetaiotaomicron
aaattgcatttgaatatttt

SEQ ID NO: 43167 - DNA, 20 bp, Prevotella bivia
cacctagtgttagcggctaa

SEQ ID NO: 43168 - DNA, 20 bp, Fusobacterium nucleatum
agagatgtttcagtgtccct

SEQ ID NO: 43169 - DNA, 20 bp, Prevotella denticola
acgtctgaattgcagcgcat

SEQ ID NO: 43170 - DNA, 20 bp, Haemophilus actinemycetemcomitans
gtcggacggtagcaggtaag

SEQ ID NO: 43171 - DNA, 20 bp, Anaerococcus tetradius
aaaactcaaaaagcctgtcc

SEQ ID NO: 43172 - DNA, 20 bp, Bacteroides uniformis
caagccttcgatggataggg

SEQ ID NO: 43173 - DNA, 20 bp, Delftia acidovorans
ttgttgggaattagttttct

SEQ ID NO: 43174 - DNA, 20 bp, Alcaligenes faecalis
gcagcgcgagagagcttgct

SEQ ID NO: 43175 - DNA, 20 bp, Bacillus coagulans
ggctgttcccctgaggagtg

SEQ ID NO: 43176 - DNA, 20 bp, Helcococcus kunzii
tgagtagatgaggggaaagt

SEQ ID NO: 43177 - DNA, 20 bp, Tetragenococcus halophilus
gcatatggctttttttcacc

SEQ ID NO: 43178 - DNA, 20 bp, Pediococcus dextrinicus
gcgccaatcctagagatagg

SEQ ID NO: 43179 - DNA, 20 bp, Arcanobacterium bernardiae
cctttcagtacagaacaagg

SEQ ID NO: 43180 - DNA, 20 bp, Campylobacter curvus
gctaataccttatactccgt

SEQ ID NO: 43181 - DNA, 20 bp, Acinetobacter haemolyticus
tagcttgctacattacctag

SEQ ID NO: 43182 - DNA, 20 bp, Anaerococcus tetradius
ttgaggtatggaagggaaag

SEQ ID NO: 43183 - DNA, 20 bp, Anaerococcus tetradius
tagttccttacttcttcgga

SEQ ID NO: 43184 - DNA, 20 bp, Chryseobacterium meningosepticum
atactgctagtcttgagtaa

SEQ ID NO: 43185 - DNA, 20 bp, Anaerobiospirillum succiniciproducens
agagggaaacgataccgtga

SEQ ID NO: 43186 - DNA, 20 bp, Rhizobium radiobacter
gacattcggggtttgggcag

SEQ ID NO: 43187 - DNA, 20 bp, Bacteroides forsythus
ttactaggagtttgcgatat

SEQ ID NO: 43188 - DNA, 20 bp, Paenibacillus validus
catgggggaatcatgaaaca

SEQ ID NO: 43189 - DNA, 20 bp, Atopobium parvulum
cggccttctgggccataact

SEQ ID NO: 43190 - DNA, 20 bp, Leptotrichia buccalis
acagacggaaacgactgata

SEQ ID NO: 43191 - DNA, 20 bp, Moraxella osloensis
ttaatacccattagattaga

SEQ ID NO: 43192 - DNA, 20 bp, Cardiobacterium hominis
ctgcgcaattgacgttacct

SEQ ID NO: 43193 - DNA, 20 bp, Prevotella melaninogenica
tgtagacgctcaacgtctga

SEQ ID NO: 43194 - DNA, 20 bp, Pseudomonas fluorescens
acttacctaatacgtgagta

SEQ ID NO: 43195 - DNA, 20 bp, Paenibacillus amylolyticus
ccagggaagaacgtccggta

SEQ ID NO: 43196 - DNA, 20 bp, Streptococcus sp.
tgattattgcatgataatta

SEQ ID NO: 43197 - DNA, 20 bp, Peptostreptococcus anaerobius
cggtggttaaaggctacggc

SEQ ID NO: 43198 - DNA, 20 bp, Clostridium clostridiiforme
gggagtcagcaacgcccgaa

SEQ ID NO: 43199 - DNA, 20 bp, Bacteroides vulgatus
aatggggggtacagagggcc

SEQ ID NO: 43200 - DNA, 20 bp, Bacteroides forsythus
tcttcccttcggggcgtcta

SEQ ID NO: 43201 - DNA, 20 bp, Actinomyces meyeri
atactggatattcactggtc

SEQ ID NO: 43202 - DNA, 20 bp, Propionibacterium propionicus
ttggaaagttctggcggtgg

SEQ ID NO: 43203 - DNA, 20 bp, Bacteroides forsythus
taaaacaggggttccgcatg

SEQ ID NO: 43204 - DNA, 20 bp, Tissierella praeacuta
gctaacagataagctgagca

SEQ ID NO: 43205 - DNA, 20 bp, Comamonas terrigena
accgcatgagaactgaggtt

SEQ ID NO: 43206 - DNA, 20 bp, Lactococcus lactis
caaagatgatcccgcgttgt

SEQ ID NO: 43207 - DNA, 20 bp, Bacillus fusiformis
acagtagtaactggctgtac

SEQ ID NO: 43208 - DNA, 20 bp, Prevotella melaninogenica
gaaggatttagagataatga

SEQ ID NO: 43209 - DNA, 20 bp, Comamonas testosteroni
acggaacgaaaagcctgggg

SEQ ID NO: 43210 - DNA, 20 bp, Moraxella  catarrhalis
acgaagttaggaagcttgct

SEQ ID NO: 43211 - DNA, 20 bp, Staphylococcus sp.
atcgaaccatgcggttcgaa

SEQ ID NO: 43212 - DNA, 20 bp, Clostridium tetani
agggtccaaccttctgtgcc

SEQ ID NO: 43213 - DNA, 20 bp, Bacteroides capilosus
tacaatggtggttaacagag

SEQ ID NO: 43214 - DNA, 20 bp, Streptococcus thermophilus
aatggatgacacatgtcatt

SEQ ID NO: 43215 - DNA, 20 bp, Brevibacillus choshinensis
aggtgttggggactccaatc

SEQ ID NO: 43216 - DNA, 20 bp, Streptococcus bovis
atgcaagtagaacgctgact

SEQ ID NO: 43217 - DNA, 20 bp, Clostridium limosum
tactaggtgtcggggtttca

SEQ ID NO: 43218 - DNA, 20 bp, Neisseria lactamica
aacccgggaattgcgttctg

SEQ ID NO: 43219 - DNA, 20 bp, Paenibacillus larvae
aataccggatagctggtttc

SEQ ID NO: 43220 - DNA, 20 bp, Bacillus schlegellii
agtcgggggcgcccgaaggc

SEQ ID NO: 43221 - DNA, 20 bp, Streptococcus mitis
tagatgttgcatgacatttg

SEQ ID NO: 43222 - DNA, 20 bp, Bacteroides forsythus
ccctgactgtcagttgctaa

SEQ ID NO: 43223 - DNA, 20 bp, Serratia marcescens
ggtggtgagcttaatacgtt

SEQ ID NO: 43224 - DNA, 20 bp, Propionibacterium avidum
gtttgacatggactgggagt

SEQ ID NO: 43225 - DNA, 20 bp, Cellulosimicrobium cellulans
ccatggcccaaccgttcgcg

SEQ ID NO: 43226 - DNA, 20 bp, Fusobacterium nucleatum
gaattatgaaagctataagc

SEQ ID NO: 43227 - DNA, 20 bp, Neisseria elongata
ttgttagggaagaaaaagga

SEQ ID NO: 43228 - DNA, 20 bp, Tissierella praeacuta
aaatgtcgcatgagatttaa

SEQ ID NO: 43229 - DNA, 20 bp, Shewanella algae
cttcgggccttgcgctgatg

SEQ ID NO: 43230 - DNA, 20 bp, Acinetobacter baumannii
gcttgctaccggacctagcg

SEQ ID NO: 43231 - DNA, 20 bp, Moraxella bovis
aagtcgaacgatgactatct

SEQ ID NO: 43232 - DNA, 20 bp, Bacteroides fragilis
tgtcagtgagcaatcaccgc

SEQ ID NO: 43233 - DNA, 20 bp, Streptococcus porcinus
catgtcatctacttaaaagg

SEQ ID NO: 43234 - DNA, 20 bp, Aerococcus christensenii
agaaagtgcttgcactttca

SEQ ID NO: 43235 - DNA, 20 bp, Anaerobiospirillum succiniciproducens
gagtggaacccacaaagcgt

SEQ ID NO: 43236 - DNA, 20 bp, Actinomyces meyeri
actggtcttcgcatgggggt

SEQ ID NO: 43237 - DNA, 20 bp, Clostridium sordellii
tggaactgtaggacttgagt

SEQ ID NO: 43238 - DNA, 20 bp, Aerococcus christensenii
gagaaagtgcttgcactttc

SEQ ID NO: 43239 - DNA, 20 bp, Comamonas terrigena
agcttcgggttaataccctg

SEQ ID NO: 43240 - DNA, 20 bp, Campylobacter lari
accgttgaactgcttgggaa

SEQ ID NO: 43241 - DNA, 20 bp, Anaerobiospirillum succiniciproducens
acgatgtcgattaggagctt

SEQ ID NO: 43242 - DNA, 20 bp, Geobacillus thermoglucosidasius
cctggagacagggcgttcct

SEQ ID NO: 43243 - DNA, 20 bp, Streptococcus acidominimus
tgagcaggggagacaggtgg

SEQ ID NO: 43244 - DNA, 20 bp, Brevibacillus choshinensis
ggccacttgaaactgggaag

SEQ ID NO: 43245 - DNA, 20 bp, Clostridium sordellii
gtaagcttttggaactgtag

SEQ ID NO: 43246 - DNA, 20 bp, Clostridium bifermentans
gcgctggcggcgtgcctaac

SEQ ID NO: 43247 - DNA, 20 bp, Streptococcus gordonii
ccgtagcttgctacaccata

SEQ ID NO: 43248 - DNA, 20 bp, Citrobacter sedlakii
ttgacatccacggaagactg

SEQ ID NO: 43249 - DNA, 20 bp, Campylobacter sputorum
tgctagtcatggcagtaatc

SEQ ID NO: 43250 - DNA, 20 bp, Arcanobacterium bernardiae
ttggaaagggtttctggata

SEQ ID NO: 43251 - DNA, 20 bp, Collinsella aerofaciens
aggtgtggggggacgatccc

SEQ ID NO: 43252 - DNA, 20 bp, Bacillus lentus
tgtctccagggcggtcagga

SEQ ID NO: 43253 - DNA, 20 bp, Facklamia ignava
gcctaccgtggctttgatgc

SEQ ID NO: 43254 - DNA, 20 bp, Propionibacterium freudenreichii
tgtaggggagaatggaactc

SEQ ID NO: 43255 - DNA, 20 bp, Facklamia sourekii
tgcaagtcgaacgaaccgac

SEQ ID NO: 43256 - DNA, 20 bp, Veillonella atypica
tatcaatcttagtggcgaac

SEQ ID NO: 43257 - DNA, 20 bp, Granulicatella elegans
gcatgactgaagaaggaaaa

SEQ ID NO: 43258 - DNA, 20 bp, Facklamia ignava
taccgcatagttgttccagt

SEQ ID NO: 43259 - DNA, 20 bp, Bacillus sp
ccgctcgttccacatgcgtc

SEQ ID NO: 43260 - DNA, 20 bp, Bacteroides thetaiotaomicron
gtttgcttgcaaactggaga

SEQ ID NO: 43261 - DNA, 20 bp, Pediococcus pentosaceus
ttgagattttaacacgaagt

SEQ ID NO: 43262 - DNA, 20 bp, Streptococcus canis
aacttaaaaggggcaactgc

SEQ ID NO: 43263 - DNA, 20 bp, Gemella haemolysans
ttgacatactgtgaggacac

SEQ ID NO: 43264 - DNA, 20 bp, Anaerococcus tetradius
agggtacgtaggcggcctag

SEQ ID NO: 43265 - DNA, 20 bp, Staphylococcus carnosus
aagaacaagtgcgtaggtaa

SEQ ID NO: 43266 - DNA, 20 bp, Bacteroides eggerthii
atgctaatcccgaaaacctc

SEQ ID NO: 43267 - DNA, 20 bp, Geobacillus thermoglucosidasius
tagggaagaagaagtgccgt

SEQ ID NO: 43268 - DNA, 20 bp, Empedobacter brevis
gttgtaaactacttttatct

SEQ ID NO: 43269 - DNA, 20 bp, Pseudomonas fluorescens
ttacctaatacgtgagtatt

SEQ ID NO: 43270 - DNA, 20 bp, Streptococcus canis
ttgcactagtctaaggagtt

SEQ ID NO: 43271 - DNA, 20 bp, Actinomyces radingae
agggtgggcggtcacattgg

SEQ ID NO: 43272 - DNA, 20 bp, Bacteroides capilosus
tcgctctgagatggcctcgc

SEQ ID NO: 43273 - DNA, 20 bp, Arcanobacterium haemolyticum
gatattctgcttctgccgca

SEQ ID NO: 43274 - DNA, 20 bp, Enterococcus dispar
gccctcaagcgggggataac

SEQ ID NO: 43275 - DNA, 20 bp, Haemophilus segnis
ggaaggcatttagtttaata

SEQ ID NO: 43276 - DNA, 20 bp, Pseudomonas fluorescens
agttgggaggaagggtactt

SEQ ID NO: 43277 - DNA, 20 bp, Bacillus sp
ctacttgcttcccgcgctcg

SEQ ID NO: 43278 - DNA, 20 bp, Leuconostoc lactis
cgcataaaacctaacaccgc

SEQ ID NO: 43279 - DNA, 20 bp, Actinomyces odontolyticus
ggcggcactgcagagatgtg

SEQ ID NO: 43280 - DNA, 20 bp, Paenibacillus macerans
ctgtcacttgaggatgggcc

SEQ ID NO: 43281 - DNA, 20 bp, Gemella haemolysans
cagtagagacggtacctaac

SEQ ID NO: 43282 - DNA, 20 bp, Anaerococcus prevotii
ggaccggtatagagatatac

SEQ ID NO: 43283 - DNA, 20 bp, Brevibacillus choshinensis
agggccacttgaaactggga

SEQ ID NO: 43284 - DNA, 20 bp, Weissella paramesenteroides
tataagagaagaacggcact

SEQ ID NO: 43285 - DNA, 20 bp, Helcococcus kunzii
gaatttaaaggctgtggctc

SEQ ID NO: 43286 - DNA, 20 bp, Clostridium tetani
ggtccaaccttctgtgccgc

SEQ ID NO: 43287 - DNA, 20 bp, Veillonella atypica
ttgatggacagaaccagaga

SEQ ID NO: 43288 - DNA, 20 bp, Oligella ureolytica
gtcttaggctaataccttaa

SEQ ID NO: 43289 - DNA, 20 bp, Paenibacillus amylolyticus
gaggtgcttgcacctctgat

SEQ ID NO: 43290 - DNA, 20 bp, Anaerococcus prevotii
acttactgggctcattctga

SEQ ID NO: 43291 - DNA, 20 bp, Streptococcus gordonii
cgcacagtttataccgtagc

SEQ ID NO: 43292 - DNA, 20 bp, Bacillus lentus
cggcatttcctccgatactt

SEQ ID NO: 43293 - DNA, 20 bp, Weissella paramesenteroides
ggcactgagagtaactgttc

SEQ ID NO: 43294 - DNA, 20 bp, Citrobacter koseri
gagatgagactgtgccttcg

SEQ ID NO: 43295 - DNA, 20 bp, Streptococcus constellatus
cgtagtttactacaccgtat

SEQ ID NO: 43296 - DNA, 20 bp, Actinomyces naeslundii
ttctgggtctgtcgcatggt

SEQ ID NO: 43297 - DNA, 20 bp, Campylobacter curvus
aaataccaaaccggttatgg

SEQ ID NO: 43298 - DNA, 20 bp, Neisseria subflava
taccgcatacgtcttgagag

SEQ ID NO: 43299 - DNA, 20 bp, Paenibacillus pabuli
gagaactggaaagacggagc

SEQ ID NO: 43300 - DNA, 20 bp, Acinetobacter genospecies 3
gcggttaccacggtgtggcc

SEQ ID NO: 43301 - DNA, 20 bp, Prevotella intermedia
gctgttagcgcctggcgtta

SEQ ID NO: 43302 - DNA, 20 bp, Streptococcus porcinus
cccatgtcatctacttaaaa

SEQ ID NO: 43303 - DNA, 20 bp, Prevotella intermedia
cgtaaccgcgaggagcgacc

SEQ ID NO: 43304 - DNA, 20 bp, Gemella bergeri
gggaagaaaggttgtgtagt

SEQ ID NO: 43305 - DNA, 20 bp, Anaerococcus tetradius
gtgatttagaaggccttcgg

SEQ ID NO: 43306 - DNA, 20 bp, Bacteroides thetaiotaomicron
gtgtggaattttgtatgtac

SEQ ID NO: 43307 - DNA, 20 bp, Gemella sanguinis
agggaagaatgattgtatag

SEQ ID NO: 43308 - DNA, 20 bp, Peptostreptococcus anaerobius
ggtaccctgtgaggaagccc

SEQ ID NO: 43309 - DNA, 20 bp, Facklamia hominis
agacggcttcggctgtcgca

SEQ ID NO: 43310 - DNA, 20 bp, Prevotella disiens
cgatacagagatgttgaggt

SEQ ID NO: 43311 - DNA, 20 bp, Listeria innocua
ggctaataccgaatgataga

SEQ ID NO: 43312 - DNA, 20 bp, Mannheimia haemolytica
gaccatttggccacctgcca

SEQ ID NO: 43313 - DNA, 20 bp, Virgibacillus pantothenticus
cagatctccttcgggggtga

SEQ ID NO: 43314 - DNA, 20 bp, Streptococcus hyovaginalis
acgggagtaagagtggaaag

SEQ ID NO: 43315 - DNA, 20 bp, Haemophilus ducreyi
aggaaggcagttttgttaat

SEQ ID NO: 43316 - DNA, 20 bp, Veillonella dispar
gacggaagcaataccgcgag

SEQ ID NO: 43317 - DNA, 20 bp, Serratia proteamaculans
gtagtgtgttaatagcacat

SEQ ID NO: 43318 - DNA, 20 bp, Corynebacterium glucuronolyticum
gagattgggctagagatagt

SEQ ID NO: 43319 - DNA, 20 bp, Anaerococcus tetradius
atagtaagcttttaaaactg

SEQ ID NO: 43320 - DNA, 20 bp, Bacteroides distasonis
ctgaagtccgtaaccgaaag

SEQ ID NO: 43321 - DNA, 20 bp, Weissella paramesenteroides
aacaaccgcatggttgttgg

SEQ ID NO: 43322 - DNA, 20 bp, Granulicatella elegans
gcgaccggtgcttgcactgg

SEQ ID NO: 43323 - DNA, 20 bp, Alcaligenes faecalis
aaagtacttttggcagagaa

SEQ ID NO: 43324 - DNA, 20 bp, Neisseria subflava
gggtgactcgagtgtgtcag

SEQ ID NO: 43325 - DNA, 20 bp, Campylobacter curvus
tagatacgggaaagtttttc

SEQ ID NO: 43326 - DNA, 20 bp, Oligella urethralis
cacgcgagatggctcgatca

SEQ ID NO: 43327 - DNA, 20 bp, Anaerobiospirillum succiniciproducens
ttgtcctttgttgccaacag

SEQ ID NO: 43328 - DNA, 20 bp, Paenibacillus larvae
agcgatccggagccaatcct

SEQ ID NO: 43329 - DNA, 20 bp, Brevibacterium casei
acagagagaggcgaacccgt

SEQ ID NO: 43330 - DNA, 20 bp, Neisseria polysaccharea
atatcagcggctgatgacgg

SEQ ID NO: 43331 - DNA, 20 bp, Prevotella intermedia
tcaatggacgtaagtctgaa

SEQ ID NO: 43332 - DNA, 20 bp, Streptococcus constellatus
agtagaacgcacaggatgca

SEQ ID NO: 43333 - DNA, 20 bp, Arcanobacterium bernardiae
aaggcaggttactgggccac

SEQ ID NO: 43334 - DNA, 20 bp, Vibrio cholerae
ggcactccagcgtctccgct

SEQ ID NO: 43335 - DNA, 20 bp, Gemella bergeri
acggtgacctaaccgaaagg

SEQ ID NO: 43336 - DNA, 20 bp, Anaerococcus tetradius
atagccgttggaaacgacga

SEQ ID NO: 43337 - DNA, 20 bp, Gemella morbillorum
gacggtggcctaacctttaa

SEQ ID NO: 43338 - DNA, 20 bp, Bacteroides fragilis
atgtattatatgaataagga

SEQ ID NO: 43339 - DNA, 20 bp, Haemophilus influenzae
tacatcaaattgacgttaaa

SEQ ID NO: 43340 - DNA, 20 bp, Peptoniphilus indolicus
aaacttgagtagtgaagagg

SEQ ID NO: 43341 - DNA, 20 bp, Tetragenococcus halophilus
aaatgctttttctatgacgg

SEQ ID NO: 43342 - DNA, 20 bp, Pseudomonas citronellolis
aggtggtttggtaagatgga

SEQ ID NO: 43343 - DNA, 20 bp, Leptotrichia buccalis
agaacaggcagtgccttcgg

SEQ ID NO: 43344 - DNA, 20 bp, Bacillus lentus
gccgctaaccaacaaaaagc

SEQ ID NO: 43345 - DNA, 20 bp, Stenotrophomonas maltophilia
cctacggaccaaagcagggg

SEQ ID NO: 43346 - DNA, 20 bp, Bacillus schlegellii
gcaacctgccctaaagaccg

SEQ ID NO: 43347 - DNA, 20 bp, Neisseria sicca
ttgggcagcatgactgctta

SEQ ID NO: 43348 - DNA, 20 bp, Bacteroides uniformis
acagaaggcagctacacggc

SEQ ID NO: 43349 - DNA, 20 bp, Acinetobacter haemolyticus
agtcgagcggggaagtgtag

SEQ ID NO: 43350 - DNA, 20 bp, Proteus mirabilis
ggtgataaggttaataccct

SEQ ID NO: 43351 - DNA, 20 bp, Propionibacterium freudenreichii
tcggtatagctccaggaaac

SEQ ID NO: 43352 - DNA, 20 bp, Prevotella loescheii
gagacgatgaggcccttcgg

SEQ ID NO: 43353 - DNA, 20 bp, Sporosarcina ureae
gctcaggacgaacgctgggc

SEQ ID NO: 43354 - DNA, 20 bp, Bacteroides thetaiotaomicron
tcagtttgcttgcaaactgg

SEQ ID NO: 43355 - DNA, 20 bp, Corynebacterium falsenii
gccacttgtggtgacggtac

SEQ ID NO: 43356 - DNA, 20 bp, Corynebacterium confusum
acccttccacgggttttgtg

SEQ ID NO: 43357 - DNA, 20 bp, Gemella haemolysans
gagggagccggtcacggtgg

SEQ ID NO: 43358 - DNA, 20 bp, Paenibacillus apiarius
cgcaggcggtgatgtaagtt

SEQ ID NO: 43359 - DNA, 20 bp, Pseudoramibacter alactolyticus
ttggggaagaaaacatgacg

SEQ ID NO: 43360 - DNA, 20 bp, Serratia ficaria
ttcagcgaggaggaagggcg

SEQ ID NO: 43361 - DNA, 20 bp, Fusobacterium nucleatum
tgatattatgattttagggc

SEQ ID NO: 43362 - DNA, 20 bp, Acinetobacter lwoffii
cggtgtggcagatgactggg

SEQ ID NO: 43363 - DNA, 20 bp, Methylobacterium mesophilicum
gcacctcagtagcgcagcta

SEQ ID NO: 43364 - DNA, 20 bp, Tissierella praeacuta
cgcatgagatttaagtcaaa

SEQ ID NO: 43365 - DNA, 20 bp, Moraxella osloensis
aaagggggcgcaagctcttg

SEQ ID NO: 43366 - DNA, 20 bp, Propionibacterium avidum
ctgtgtgggggtagccgtcg

SEQ ID NO: 43367 - DNA, 20 bp, Campylobacter rectus
aggatgaggctatatcgtat

SEQ ID NO: 43368 - DNA, 20 bp, Prevotella intermedia
caggatacagagatgttgac

SEQ ID NO: 43369 - DNA, 20 bp, Morganella morganii
gcgccatcagatgaacccat

SEQ ID NO: 43370 - DNA, 20 bp, Helcococcus kunzii
tgcaagttgaacgagaattt

SEQ ID NO: 43371 - DNA, 20 bp, Chromobacterium violaceum
agggaggaaatcccgctggt

SEQ ID NO: 43372 - DNA, 20 bp, Facklamia ignava
ctcagtgctggcgcaaacgc

SEQ ID NO: 43373 - DNA, 20 bp, Peptostreptococcus anaerobius
ttgcaggggaagataatgac

SEQ ID NO: 43374 - DNA, 20 bp, Arthrobacter globiformis
gaaagatttattggtcttgg

SEQ ID NO: 43375 - DNA, 20 bp, Acinetobacter calcoaceticus
actatcacttagcggcggac

SEQ ID NO: 43376 - DNA, 20 bp, Gemella bergeri
tgaagacggtgacctaaccg

SEQ ID NO: 43377 - DNA, 20 bp, Facklamia ignava
cagcgagaagcgacgtcgcg

SEQ ID NO: 43378 - DNA, 20 bp, Peptoniphilus indolicus
aaagatgggaactctaaagg

SEQ ID NO: 43379 - DNA, 20 bp, Anaerococcus prevotii
aacccttcggggtgaagata

SEQ ID NO: 43380 - DNA, 20 bp, Porphyromonas endodontalis
cgcgaggaaggggcggatga

SEQ ID NO: 43381 - DNA, 20 bp, Acinetobacter haemolyticus
aggaggctactctagttaat

SEQ ID NO: 43382 - DNA, 20 bp, Listeria monocytogenes
gaatgataaagtgtggcgca

SEQ ID NO: 43383 - DNA, 20 bp, Weeksella virosa
tttcttcggacagaatgcaa

SEQ ID NO: 43384 - DNA, 20 bp, Fusobacterium varium
gatattatgactgagtcgca

SEQ ID NO: 43385 - DNA, 20 bp, Fusobacterium nucleatum
gagatgtttcagtgtccctt

SEQ ID NO: 43386 - DNA, 20 bp, Streptococcus iniae
gtagaacgctgaggattggt

SEQ ID NO: 43387 - DNA, 20 bp, Bacillus oleronius
ttcttcgcatgagggagaat

SEQ ID NO: 43388 - DNA, 20 bp, Streptococcus parasanguinis
gagcggaggagttgcgaacg

SEQ ID NO: 43389 - DNA, 20 bp, Prevotella melaninogenica
gtagacgctcaacgtctgac

SEQ ID NO: 43390 - DNA, 20 bp, Bacillus schlegellii
gcaagtcgagcggggagcgg

SEQ ID NO: 43391 - DNA, 20 bp, Anaerococcus tetradius
aggcggataagcaagttaga

SEQ ID NO: 43392 - DNA, 20 bp, Corynebacterium falsenii
ggtgtggggatctttctacg

SEQ ID NO: 43393 - DNA, 20 bp, Leuconostoc argentinum
tgattctagttcgacggtac

SEQ ID NO: 43394 - DNA, 20 bp, Corynebacterium ulcerans
tgagggtcttccacgacttt

SEQ ID NO: 43395 - DNA, 20 bp, Clostridium tertium
aggaagtcctttcggggaca

SEQ ID NO: 43396 - DNA, 20 bp, Weeksella virosa
accaaggcttaaatgcataa

SEQ ID NO: 43397 - DNA, 20 bp, Streptococcus canis
catgttaagaacttaaaagg

SEQ ID NO: 43398 - DNA, 20 bp, Propionibacterium avidum
aacctgtgtgggggtagccg

SEQ ID NO: 43399 - DNA, 20 bp, Gemella haemolysans
tttttctggtgcttgcactg

SEQ ID NO: 43400 - DNA, 20 bp, Fusobacterium mortiferum
atatgcgctgcaggagagct

SEQ ID NO: 43401 - DNA, 20 bp, Weissella paramesenteroides
tgacgagcttgctctgattt

SEQ ID NO: 43402 - DNA, 20 bp, Brevundimonas vesicularis
agtatgagagaggtgtgtgg

SEQ ID NO: 43403 - DNA, 20 bp, Suttonella indologenes
cataacacttacgagtcaaa

SEQ ID NO: 43404 - DNA, 20 bp, Anaerococcus prevotii
taactactgtaagcatttga

SEQ ID NO: 43405 - DNA, 20 bp, Gemella bergeri
gtggtttagaaagtctgatg

SEQ ID NO: 43406 - DNA, 20 bp, Streptococcus porcinus
cagtctaatgagttgcgaac

SEQ ID NO: 43407 - DNA, 20 bp, Bacillus azotoformans
tgataaaggagcttgctcct

SEQ ID NO: 43408 - DNA, 20 bp, Empedobacter brevis
atcaactgacgctgatggac

SEQ ID NO: 43409 - DNA, 20 bp, Streptococcus dysgalactiae
ttagagaagaatgatggtgg

SEQ ID NO: 43410 - DNA, 20 bp, Bacteroides capilosus
tagttcttgagtgctggaga

SEQ ID NO: 43411 - DNA, 20 bp, Arcanobacterium bernardiae
gtgtggtaggggtaattgga

SEQ ID NO: 43412 - DNA, 20 bp, Facklamia ignava
gagttgcattggaaactggt

SEQ ID NO: 43413 - DNA, 20 bp, Brochothrix campestris
ggtgagagtaactgttcacc

SEQ ID NO: 43414 - DNA, 20 bp, Prevotella melaninogenica
gggatggtgtaatgcaaatt

SEQ ID NO: 43415 - DNA, 20 bp, Fusobacterium mortiferum
aattcatatgaaagctatat

SEQ ID NO: 43416 - DNA, 20 bp, Kocuria rosea
tagatggacccgcggtgtat

SEQ ID NO: 43417 - DNA, 20 bp, Actinomyces bovis
cataccgcgcaaaagcacag

SEQ ID NO: 43418 - DNA, 20 bp, Campylobacter lari
ctgtgctagtcacggcagta

SEQ ID NO: 43419 - DNA, 20 bp, Prevotella intermedia
gtagcctttcactttctggc

SEQ ID NO: 43420 - DNA, 20 bp, Serratia proteamaculans
gttaatagcacattgcattg

SEQ ID NO: 43421 - DNA, 20 bp, Bacillus oleronius
ctccctgatgattagcggcg

SEQ ID NO: 43422 - DNA, 20 bp, Prevotella bivia
tacggaaggttcgggcgtta

SEQ ID NO: 43423 - DNA, 20 bp, Tissierella praeacuta
tgtcgcatgagatttaagtc

SEQ ID NO: 43424 - DNA, 20 bp, Pediococcus parvulus
cttctgccaatctaagagat

SEQ ID NO: 43425 - DNA, 20 bp, Rothia mucilaginosa
gggcttaaccccgtgtattg

SEQ ID NO: 43426 - DNA, 20 bp, Prevotella bivia
ggccgtttggtaagcgtgtt

SEQ ID NO: 43427 - DNA, 20 bp, Bacteroides forsythus
tgaaagtttgtcgcttaacg

SEQ ID NO: 43428 - DNA, 20 bp, Neisseria flavescens
aggctgttgctaatatcgac

SEQ ID NO: 43429 - DNA, 20 bp, Porphyromonas endodontalis
atagttactaacaggttatg

SEQ ID NO: 43430 - DNA, 20 bp, Prevotella melaninogenica
gcagctgacgggagcgcaac

SEQ ID NO: 43431 - DNA, 20 bp, Facklamia ignava
gcatagttgttccagtcgca

SEQ ID NO: 43432 - DNA, 20 bp, Paenibacillus lautus
agcaggtaaggctgggcact

SEQ ID NO: 43433 - DNA, 20 bp, Paenibacillus apiarius
gttgggtgtttaaacctagg

SEQ ID NO: 43434 - DNA, 20 bp, Microbacterium testaceum
cgtgtttggaaagatttttc

SEQ ID NO: 43435 - DNA, 20 bp, Kingella kingae
ggaagaaaaggttgatgcta

SEQ ID NO: 43436 - DNA, 20 bp, Corynebacterium jeikeium
gtgggggttttatttacgat

SEQ ID NO: 43437 - DNA, 20 bp, Bacteroides uniformis
ggcttgaattgcaactgaat

SEQ ID NO: 43438 - DNA, 20 bp, Anaerococcus prevotii
ggttcgcaggcggaaatgca

SEQ ID NO: 43439 - DNA, 20 bp, Propionibacterium freudenreichii
cggtcagggatcgtctcgcg

SEQ ID NO: 43440 - DNA, 20 bp, Alcaligenes faecalis
ttgacatgtctggaaagccg

SEQ ID NO: 43441 - DNA, 20 bp, Streptococcus hyovaginalis
aagaacgggagtaagagtgg

SEQ ID NO: 43442 - DNA, 20 bp, Streptococcus dysgalactiae
tcaaggagttgcgaacgggt

SEQ ID NO: 43443 - DNA, 20 bp, Gemella sanguinis
tagggaagaatgattgtata

SEQ ID NO: 43444 - DNA, 20 bp, Porphyromonas endodontalis
atcacacagaacgccgattg

SEQ ID NO: 43445 - DNA, 20 bp, Prevotella melaninogenica
ataacctgccgaaaggcaga

SEQ ID NO: 43446 - DNA, 20 bp, Myroides odoratus
gctaccaggcaactggatgc

SEQ ID NO: 43447 - DNA, 20 bp, Bacillus megaterium
ggataggatcttctccttca

SEQ ID NO: 43448 - DNA, 20 bp, Campylobacter lari
actctatactcctgcttaac

SEQ ID NO: 43449 - DNA, 20 bp, Moellerella wisconsensis
acctgggaatggcatctaaa

SEQ ID NO: 43450 - DNA, 20 bp, Facklamia ignava
gtaactgttataggtttgac

SEQ ID NO: 43451 - DNA, 20 bp, Acinetobacter johnsonii
gcttgctacctaacctagcg

SEQ ID NO: 43452 - DNA, 20 bp, Propionibacterium freudenreichii
gtatagctccaggaaactgg

SEQ ID NO: 43453 - DNA, 20 bp, Clostridium ramosum
actgcatggtgaccgtatta

SEQ ID NO: 43454 - DNA, 20 bp, Facklamia ignava
cctaccgtggctttgatgca

SEQ ID NO: 43455 - DNA, 20 bp, Bacillus sp
cgttaaaaggcggcgcaagc

SEQ ID NO: 43456 - DNA, 20 bp, Bacillus halodurans
cggaccaaagggagcttgct

SEQ ID NO: 43457 - DNA, 20 bp, Photobacterium damselae
ttaacacctgcattatttga

SEQ ID NO: 43458 - DNA, 20 bp, Acinetobacter radioresistens
cgttggggcccttgaggctt

SEQ ID NO: 43459 - DNA, 20 bp, Anaerobiospirillum succiniciproducens
agaggcgaaggcggtctcct

SEQ ID NO: 43460 - DNA, 20 bp, Gemella haemolysans
gagatcagtgctgcagctaa

SEQ ID NO: 43461 - DNA, 20 bp, Actinomyces bovis
gcgcaaaagcacagagatgt

SEQ ID NO: 43462 - DNA, 20 bp, Corynebacterium group F
acaaagccggccttagttcg

SEQ ID NO: 43463 - DNA, 20 bp, Alicyclobacillus acidocaldarius
actttcactccagacttgct

SEQ ID NO: 43464 - DNA, 20 bp, Corynebacterium accolens
ataggaaccatctttagtgt

SEQ ID NO: 43465 - DNA, 20 bp, Corynebacterium auris
cactggatcgggccagagat

SEQ ID NO: 43466 - DNA, 20 bp, Prevotella melaninogenica
tggtgtaatgcaaattgcat

SEQ ID NO: 43467 - DNA, 20 bp, Ralstonia paucula
accgaaaggcctcgcgcagc

SEQ ID NO: 43468 - DNA, 20 bp, Acinetobacter johnsonii
agcttgctacctaacctagc

SEQ ID NO: 43469 - DNA, 20 bp, Pseudoramibacter alactolyticus
gcctgtgagagaaccgcaag

SEQ ID NO: 43470 - DNA, 20 bp, Veillonella parvula
ggcggatcagtcagtctgtc

SEQ ID NO: 43471 - DNA, 20 bp, Fusobacterium nucleatum
ctaatattatgataataggg

SEQ ID NO: 43472 - DNA, 20 bp, Pseudoramibacter alactolyticus
tgaatgatccttcgggtgaa

SEQ ID NO: 43473 - DNA, 20 bp, Dolosigranulum pigrum
taaccgtggaacggcattgg

SEQ ID NO: 43474 - DNA, 20 bp, Helcococcus kunzii
ctacctcgtgagagcaagcg

SEQ ID NO: 43475 - DNA, 20 bp, Peptoniphilus indolicus
tgcctttgacacggggatag

SEQ ID NO: 43476 - DNA, 20 bp, Weeksella virosa
actaagtctatattgacgct

SEQ ID NO: 43477 - DNA, 20 bp, Pseudomonas fluorescens
gtgagtattttgacgttacc

SEQ ID NO: 43478 - DNA, 20 bp, Tetragenococcus halophilus
gtaacacgtggggaacctat

SEQ ID NO: 43479 - DNA, 20 bp, Neisseria flavescens
tgctaatatcgacagctgat

SEQ ID NO: 43480 - DNA, 20 bp, Streptococcus parasanguinis
gtgcttgcaccgagcggagg

SEQ ID NO: 43481 - DNA, 20 bp, Haemophilus paraphrophilus
acaacaaattgacgttaatc

SEQ ID NO: 43482 - DNA, 20 bp, Peptostreptococcus anaerobius
atatttacggcatcgtagat

SEQ ID NO: 43483 - DNA, 20 bp, Haemophilus paraphrophilus
ggaaggttgttgtgtgaata

SEQ ID NO: 43484 - DNA, 20 bp, Lactococcus garvieae
gcttcctaaggtaagaccga

SEQ ID NO: 43485 - DNA, 20 bp, Tissierella praeacuta
ttctgtcctaagggacgata

SEQ ID NO: 43486 - DNA, 20 bp, Prevotella bivia
ttctgctgggcactctggag

SEQ ID NO: 43487 - DNA, 20 bp, Kytococcus sedentarius
ttgggcgctaggcgtgggtc

SEQ ID NO: 43488 - DNA, 20 bp, Streptococcus iniae
aagtagaacgctgaggattg

SEQ ID NO: 43489 - DNA, 20 bp, Clostridium clostridiiforme
ctgaagtgaaaacccagggc

SEQ ID NO: 43490 - DNA, 20 bp, Atopobium parvulum
acccgagtcgattgcacccg

SEQ ID NO: 43491 - DNA, 20 bp, Campylobacter curvus
aaccggttatggtccacagt

SEQ ID NO: 43492 - DNA, 20 bp, Gemella morbillorum
agaaaaacttagcggcgaac

SEQ ID NO: 43493 - DNA, 20 bp, Bacteroides distasonis
gccacctggcgacagggagc

SEQ ID NO: 43494 - DNA, 20 bp, Arthrobacter globiformis
caaggcttgacatgttcctg

SEQ ID NO: 43495 - DNA, 20 bp, Bacteroides fragilis
cattattaaaggattccggt

SEQ ID NO: 43496 - DNA, 20 bp, Propionibacterium freudenreichii
atgtactggaagcgttcaga

SEQ ID NO: 43497 - DNA, 20 bp, Turicella otitidis
ggataggagccatttttagt

SEQ ID NO: 43498 - DNA, 20 bp, Clostridium botulinum
acaatggtaggtacaataag

SEQ ID NO: 43499 - DNA, 20 bp, Gemella sanguinis
atagacggggacaactattg

SEQ ID NO: 43500 - DNA, 20 bp, Propionibacterium freudenreichii
accgccggggccaactcgga

SEQ ID NO: 43501 - DNA, 20 bp, Actinomyces naeslundii
tacgggatattctgggtctg

SEQ ID NO: 43502 - DNA, 20 bp, Aneurinibacillus thermoaerophilus
cagggaagaaccgccgggat

SEQ ID NO: 43503 - DNA, 20 bp, Prevotella melaninogenica
tttgtatggggataaagtca

SEQ ID NO: 43504 - DNA, 20 bp, Aerococcus christensenii
atcacttatcgatggccttg

SEQ ID NO: 43505 - DNA, 20 bp, Lactococcus garvieae
gggagctataagttctctgt

SEQ ID NO: 43506 - DNA, 20 bp, Actinomyces radingae
gggagatgggctcgcggctt

SEQ ID NO: 43507 - DNA, 20 bp, Brochothrix campestris
taatacaaagggtcgcgaag

SEQ ID NO: 43508 - DNA, 20 bp, Aneurinibacillus thermoaerophilus
acccctccagagatggaggc

SEQ ID NO: 43509 - DNA, 20 bp, Gemella morbillorum
tggttatgctaacactatga

SEQ ID NO: 43510 - DNA, 20 bp, Enterococcus cecorum
ggatgaaaggcgcttttgcg

SEQ ID NO: 43511 - DNA, 20 bp, Tissierella praeacuta
ggctcaaccgtggtaagcat

SEQ ID NO: 43512 - DNA, 20 bp, Prevotella melaninogenica
caatgggcgcgagcctgaac

SEQ ID NO: 43513 - DNA, 20 bp, Photobacterium damselae
catatacagagggcagcaag

SEQ ID NO: 43514 - DNA, 20 bp, Oligella urethralis
actcgccatcaagagagcaa

SEQ ID NO: 43515 - DNA, 20 bp, Streptococcus equi
gtaggtaacctagcttatag

SEQ ID NO: 43516 - DNA, 20 bp, Chromobacterium violaceum
gaatgtaccgtgtaatgggg

SEQ ID NO: 43517 - DNA, 20 bp, Staphylococcus aureus
gcttctcgtccgttcgctcg

SEQ ID NO: 43518 - DNA, 20 bp, Anaerococcus prevotii
tatcggaataattcggtgcc

SEQ ID NO: 43519 - DNA, 20 bp, Paenibacillus azotofixans
ttgacatccctctgaatacg

SEQ ID NO: 43520 - DNA, 20 bp, Proteus vulgaris
ggaaggtgataaagttaata

SEQ ID NO: 43521 - DNA, 20 bp, Lactococcus garvieae
caaggagggcgcttcctaag

SEQ ID NO: 43522 - DNA, 20 bp, Veillonella atypica
tctatcaatcttagtggcga

SEQ ID NO: 43523 - DNA, 20 bp, Clostridium ramosum
cctgcaactgacgctcagtc

SEQ ID NO: 43524 - DNA, 20 bp, Leuconostoc lactis
tatctgatagtaactgatca

SEQ ID NO: 43525 - DNA, 20 bp, Prevotella melaninogenica
ggcagctgacgggagcgcaa

SEQ ID NO: 43526 - DNA, 20 bp, Aerococcus viridans
tgctgtcacttatagatgac

SEQ ID NO: 43527 - DNA, 20 bp, Prevotella melaninogenica
gataacctgccgaaaggcag

SEQ ID NO: 43528 - DNA, 20 bp, Turicella otitidis
ccatttttagtgtgatggtt

SEQ ID NO: 43529 - DNA, 20 bp, Haemophilus segnis
atacagagggcgacgaagcc

SEQ ID NO: 43530 - DNA, 20 bp, Prevotella oris
cgaacgattcagagatgatg

SEQ ID NO: 43531 - DNA, 20 bp, Campylobacter lari
tatactcctgcttaacacaa

SEQ ID NO: 43532 - DNA, 20 bp, Brevibacillus choshinensis
tggagggccacttgaaactg

SEQ ID NO: 43533 - DNA, 20 bp, Anaerobiospirillum succiniciproducens
ctcctgggcaaatactgacg

SEQ ID NO: 43534 - DNA, 20 bp, Leuconostoc argentinum
tacaaagttgaaaggcgcta

SEQ ID NO: 43535 - DNA, 20 bp, Streptococcus infantarius
aacatgggttaaatgctgtt

SEQ ID NO: 43536 - DNA, 20 bp, Bacteroides ureolyticus
gttgttgctttgctagtcaa

SEQ ID NO: 43537 - DNA, 20 bp, Haemophilus actinemycetemcomitans
atgggtttgtgccttaggga

SEQ ID NO: 43538 - DNA, 20 bp, Prevotella loescheii
ggtgaccaagcgaaagcgtt

SEQ ID NO: 43539 - DNA, 20 bp, Prevotella oralis
ttgcgtaggcagcttgctgt

SEQ ID NO: 43540 - DNA, 20 bp, Eggerthella lenta
tcgagttcggtagaggcagg

SEQ ID NO: 43541 - DNA, 20 bp, Clostridium difficile
ctaaccttttggaagaagtc

SEQ ID NO: 43542 - DNA, 20 bp, Streptococcus dysgalactiae
ggctcaaccactgtacgctt

SEQ ID NO: 43543 - DNA, 20 bp, Corynebacterium group F
ggggatgctaatcgcacaaa

SEQ ID NO: 43544 - DNA, 20 bp, Haemophilus segnis
gtatacagagggcgacgaag

SEQ ID NO: 43545 - DNA, 20 bp, Bacteroides eggerthii
gatgctaatcccgaaaacct

SEQ ID NO: 43546 - DNA, 20 bp, Streptococcus thermophilus
gagcggatgagttgcgaacg

SEQ ID NO: 43547 - DNA, 20 bp, Campylobacter concisus
caactcgaccacgtgaagtc

SEQ ID NO: 43548 - DNA, 20 bp, Helcococcus ovis
tgctagttgtcgggagtcaa

SEQ ID NO: 43549 - DNA, 20 bp, Paenibacillus macerans
gacaggggacacaggtggtg

SEQ ID NO: 43550 - DNA, 20 bp, Kingella denitrificans
tttgttgacggtacctaaag

SEQ ID NO: 43551 - DNA, 20 bp, Campylobacter rectus
tgttgcttcgctagtcgagg

SEQ ID NO: 43552 - DNA, 20 bp, Streptococcus infantarius
atgggttaaatgctgttatg

SEQ ID NO: 43553 - DNA, 20 bp, Granulicatella elegans
aagcgagcgcaggcggtcaa

SEQ ID NO: 43554 - DNA, 20 bp, Prevotella bivia
cgtttggtaagcgtgttgtg

SEQ ID NO: 43555 - DNA, 20 bp, Bacteroides uniformis
acatgtcagccgcaaggcag

SEQ ID NO: 43556 - DNA, 20 bp, Propionibacterium avidum
tggactgggagtgctcagag

SEQ ID NO: 43557 - DNA, 20 bp, Prevotella oralis
ccggtgatgtgcagcgcgaa

SEQ ID NO: 43558 - DNA, 20 bp, Weissella paramesenteroides
ggttgttggttgaaagatgg

SEQ ID NO: 43559 - DNA, 20 bp, Rothia mucilaginosa
tggaccgcatcagagatggt

SEQ ID NO: 43560 - DNA, 20 bp, Streptococcus equi
gttaaccatttaaaaggagc

SEQ ID NO: 43561 - DNA, 20 bp, Shigella dysenteriae
tgacatccacagaaccttgt

SEQ ID NO: 43562 - DNA, 20 bp, Bacteroides stercoris
cggcgacgtggtgctaatcc

SEQ ID NO: 43563 - DNA, 20 bp, Peptostreptococcus anaerobius
taacatactgaaaagtttac

SEQ ID NO: 43564 - DNA, 20 bp, Veillonella atypica
ttcctcttcttcggaagcca

SEQ ID NO: 43565 - DNA, 20 bp, Brevibacterium epidermidis
cagttcttctctttggagct

SEQ ID NO: 43566 - DNA, 20 bp, Proteus penneri
cctttatcaattgacgttac

SEQ ID NO: 43567 - DNA, 20 bp, Leptotrichia buccalis
cgatgatgaagatagttcac

SEQ ID NO: 43568 - DNA, 20 bp, Pediococcus inopinatus
gacgcactttcgttgaatga

SEQ ID NO: 43569 - DNA, 20 bp, Listeria monocytogenes
atgataaagtgtggcgcatg

SEQ ID NO: 43570 - DNA, 20 bp, Bacillus pumilus
tagccaatcccataaatctg

SEQ ID NO: 43571 - DNA, 20 bp, Brevibacillus reuszeri
tagggacgaataagtaccgt

SEQ ID NO: 43572 - DNA, 20 bp, Bacillus simplex
taccagagtaactgctggta

SEQ ID NO: 43573 - DNA, 20 bp, Campylobacter sputorum
gtcctagcttgctaggatgg

SEQ ID NO: 43574 - DNA, 20 bp, Bacteroides uniformis
gatgtggagacatgtcagcc

SEQ ID NO: 43575 - DNA, 20 bp, Bacillus lentus
gcatttcctccgatacttgt

SEQ ID NO: 43576 - DNA, 20 bp, Leuconostoc lactis
aacatttgagtgagtggcgg

SEQ ID NO: 43577 - DNA, 20 bp, Brevibacterium linens
agaccgttctggaaacagtt

SEQ ID NO: 43578 - DNA, 20 bp, Propionibacterium freudenreichii
tgcaagtcggacggtaaggc

SEQ ID NO: 43579 - DNA, 20 bp, Bacillus circulans
tctcatgaggaaaagctgaa

SEQ ID NO: 43580 - DNA, 20 bp, Prevotella bivia
acaatgggtggtacagatag

SEQ ID NO: 43581 - DNA, 20 bp, Anaerococcus tetradius
cgcgtgatttagaaggcctt

SEQ ID NO: 43582 - DNA, 20 bp, Anaerococcus tetradius
ttaaaactgctcatcttgag

SEQ ID NO: 43583 - DNA, 20 bp, Facklamia sourekii
cctaaccattggagggagcc

SEQ ID NO: 43584 - DNA, 20 bp, Bacillus oleronius
gagcgaatctgatgggagct

SEQ ID NO: 43585 - DNA, 20 bp, Leuconostoc lactis
gcactctcgtttagattgaa

SEQ ID NO: 43586 - DNA, 20 bp, Corynebacterium coyleae
cacattttggatggtgtggt

SEQ ID NO: 43587 - DNA, 20 bp, Corynebacterium ulcerans
acatatacaagatcggcgta

SEQ ID NO: 43588 - DNA, 20 bp, Microbacterium hominis
tggtcagtagctggaaagat

SEQ ID NO: 43589 - DNA, 20 bp, Tissierella praeacuta
agacagcgatgggtagccgg

SEQ ID NO: 43590 - DNA, 20 bp, Prevotella loescheii
ttaagcgtgttgtgaaatcc

SEQ ID NO: 43591 - DNA, 20 bp, Atopobium parvulum
cttcgggtgtgtataaagtg

SEQ ID NO: 43592 - DNA, 20 bp, Facklamia ignava
gcactgttatcagagaagaa

SEQ ID NO: 43593 - DNA, 20 bp, Clostridium ramosum
atggtgaccgtattaaaagt

SEQ ID NO: 43594 - DNA, 20 bp, Pediococcus pentosaceus
tcgaacgaacttccgttaat

SEQ ID NO: 43595 - DNA, 20 bp, Campylobacter sputorum
tcttgtgaaatctagtagct

SEQ ID NO: 43596 - DNA, 20 bp, Paenibacillus peoriae
cttctaaacaacctagcggc

SEQ ID NO: 43597 - DNA, 20 bp, Bacillus lentus
gcaactagaaccaagggttg

SEQ ID NO: 43598 - DNA, 20 bp, Moraxella  catarrhalis
ttatggttaatacccataag

SEQ ID NO: 43599 - DNA, 20 bp, Prevotella melaninogenica
gcattgagtgcttgcactca

SEQ ID NO: 43600 - DNA, 20 bp, Methylobacterium mesophilicum
gtgttatggggagagattcc

SEQ ID NO: 43601 - DNA, 20 bp, Campylobacter rectus
cggagattaagtagcttgct

SEQ ID NO: 43602 - DNA, 20 bp, Tissierella praeacuta
agctacttagcgataagatg

SEQ ID NO: 43603 - DNA, 20 bp, Listeria innocua
tggcgcatgccacgctcttg

SEQ ID NO: 43604 - DNA, 20 bp, Pediococcus inopinatus
agtcggacgcactttcgttg

SEQ ID NO: 43605 - DNA, 20 bp, Eubacterium moniliforme
tcacaccacggaagttggga

SEQ ID NO: 43606 - DNA, 20 bp, Propionibacterium avidum
ggtggttgattgcgtcggaa

SEQ ID NO: 43607 - DNA, 20 bp, Paenibacillus larvae
ttgcggaaacgtgagctaat

SEQ ID NO: 43608 - DNA, 20 bp, Streptococcus thermophilus
taccgcataacaatggatga

SEQ ID NO: 43609 - DNA, 20 bp, Anaerobiospirillum succiniciproducens
tttagagataagagagtgcc

SEQ ID NO: 43610 - DNA, 20 bp, Bacteroides uniformis
cgttccattaggttgttggc

SEQ ID NO: 43611 - DNA, 20 bp, Ralstonia paucula
ctggctaatacctggggtag

SEQ ID NO: 43612 - DNA, 20 bp, Ewingella americana
gttgtgggcttgacccgtgg

SEQ ID NO: 43613 - DNA, 20 bp, Propionibacterium freudenreichii
cccgaatatgagcctggcct

SEQ ID NO: 43614 - DNA, 20 bp, Corynebacterium amycolatum
ccggataggaccatggtgtg

SEQ ID NO: 43615 - DNA, 20 bp, Peptostreptococcus anaerobius
aaagtgttagcggtatagga

SEQ ID NO: 43616 - DNA, 20 bp, Campylobacter lari
ttgctgtgctagtcacggca

SEQ ID NO: 43617 - DNA, 20 bp, Clostridium butyricum
aaaactataaaaccgatctc

SEQ ID NO: 43618 - DNA, 20 bp, Moraxella lacunata
gtggttaatacctacaagcc

SEQ ID NO: 43619 - DNA, 20 bp, Bacillus sp
tcgagcgcgggaagcaagta

SEQ ID NO: 43620 - DNA, 20 bp, Lactococcus lactis
caagtgacggtaactaccca

SEQ ID NO: 43621 - DNA, 20 bp, Paenibacillus glucanolyticus
tatgagagtgacggtacttg

SEQ ID NO: 43622 - DNA, 20 bp, Pasteurella trehalosi
gtgttttgtttaatagacaa

SEQ ID NO: 43623 - DNA, 20 bp, Corynebacterium falsenii
ctacgatttccgtgccgtag

SEQ ID NO: 43624 - DNA, 20 bp, Anaerococcus tetradius
tctggtcatcatctgacgct

SEQ ID NO: 43625 - DNA, 20 bp, Staphylococcus capitis
agctgtttagtgtcagttgt

SEQ ID NO: 43626 - DNA, 20 bp, Tissierella praeacuta
cttcggaatgaaactttaat

SEQ ID NO: 43627 - DNA, 20 bp, Actinomyces bovis
gaacgataggaagagggaat

SEQ ID NO: 43628 - DNA, 20 bp, Gemella bergeri
caaaacagacggtacctaac

SEQ ID NO: 43629 - DNA, 20 bp, Corynebacterium glucuronolyticum
gaccgcatcgtggttggtgt

SEQ ID NO: 43630 - DNA, 20 bp, Alicyclobacillus acidocaldarius
ccgcctcaacgcgctggtaa

SEQ ID NO: 43631 - DNA, 20 bp, Streptococcus canis
aacccattatgtgacggtaa

SEQ ID NO: 43632 - DNA, 20 bp, Facklamia ignava
tgggaaacctacccttcagc

SEQ ID NO: 43633 - DNA, 20 bp, Gemella haemolysans
tctgacctttggttagacac

SEQ ID NO: 43634 - DNA, 20 bp, Bacillus coagulans
aaaactctgttgccggggaa

SEQ ID NO: 43635 - DNA, 20 bp, Actinomyces odontolyticus
ttgggataacgcccggaaac

SEQ ID NO: 43636 - DNA, 20 bp, Alicyclobacillus acidocaldarius
cccccgcaagaagatgcctc

SEQ ID NO: 43637 - DNA, 20 bp, Brochothrix campestris
agccggtttggtaaccttcg

SEQ ID NO: 43638 - DNA, 20 bp, Leptotrichia buccalis
cttaacacatgcaagtcttt

SEQ ID NO: 43639 - DNA, 20 bp, Corynebacterium xerosis
aaactcctttcaccatcgac

SEQ ID NO: 43640 - DNA, 20 bp, Delftia acidovorans
aacgaaaaagcttctcctaa

SEQ ID NO: 43641 - DNA, 20 bp, Streptococcus bovis
actactttagcttgctagag

SEQ ID NO: 43642 - DNA, 20 bp, Haemophilus actinemycetemcomitans
tttgtgccttagggagcttt

SEQ ID NO: 43643 - DNA, 20 bp, Clostridium paraputrificum
cggtacaacgagatgcaata

SEQ ID NO: 43644 - DNA, 20 bp, Facklamia ignava
tcagagaagaatagcctgta

SEQ ID NO: 43645 - DNA, 20 bp, Veillonella atypica
cgagaaacactctctcagtt

SEQ ID NO: 43646 - DNA, 20 bp, Bacillus thuringiensis
tgaaccgcatggttcgaaat

SEQ ID NO: 43647 - DNA, 20 bp, Corynebacterium glucuronolyticum
agttcgtcccttgtggctca

SEQ ID NO: 43648 - DNA, 20 bp, Bacillus alcalophilus
tgccgttcgaataggtcggc

SEQ ID NO: 43649 - DNA, 20 bp, Pediococcus pentosaceus
tttaacacgaagtgagtggc

SEQ ID NO: 43650 - DNA, 20 bp, Campylobacter curvus
gaggctatatcgtatcagct

SEQ ID NO: 43651 - DNA, 20 bp, Actinomyces neuii
ctcgcatggggttgttggga

SEQ ID NO: 43652 - DNA, 20 bp, Anaerococcus prevotii
gtctttcccagttcggattg

SEQ ID NO: 43653 - DNA, 20 bp, Arcanobacterium bernardiae
ggcctttttggttgagggta

SEQ ID NO: 43654 - DNA, 20 bp, Acinetobacter johnsonii
ggctacttggattaatactc

SEQ ID NO: 43655 - DNA, 20 bp, Bacteroides fragilis
atgattccgcatggtttcat

SEQ ID NO: 43656 - DNA, 20 bp, Cardiobacterium hominis
tctgccttttgctgggggat

SEQ ID NO: 43657 - DNA, 20 bp, Corynebacterium accolens
atctttagtgtggtggttgg

SEQ ID NO: 43658 - DNA, 20 bp, Bacillus megaterium
ataggatcttctccttcatg

SEQ ID NO: 43659 - DNA, 20 bp, Gemella bergeri
ctataagatggctttgcgga

SEQ ID NO: 43660 - DNA, 20 bp, Nocardia asteroides
gggggaggttgcttcggtaa

SEQ ID NO: 43661 - DNA, 20 bp, Kocuria kristinae
tcgttccagagatggttctt

SEQ ID NO: 43662 - DNA, 20 bp, Pasteurella multocida
aggaaagggtgggaccttag

SEQ ID NO: 43663 - DNA, 20 bp, Streptococcus canis
ataccgcataaaagtgctta

SEQ ID NO: 43664 - DNA, 20 bp, Enterococcus avium
tcgaaaccgcatggtttcgg

SEQ ID NO: 43665 - DNA, 20 bp, Bacteroides capilosus
cgctctgagatggcctcgcg

SEQ ID NO: 43666 - DNA, 20 bp, Bacillus schlegellii
gcggaagcctttgggtggaa

SEQ ID NO: 43667 - DNA, 20 bp, Campylobacter curvus
accaaaccggttatggtcca

SEQ ID NO: 43668 - DNA, 20 bp, Prevotella melaninogenica
atgtagacgctcaacgtctg

SEQ ID NO: 43669 - DNA, 20 bp, Anaerococcus prevotii
ttagacattgggatagcctc

SEQ ID NO: 43670 - DNA, 20 bp, Clostridium botulinum
atcaactccccctgtgccgc

SEQ ID NO: 43671 - DNA, 20 bp, Campylobacter curvus
tatactagttgttgctaagc

SEQ ID NO: 43672 - DNA, 20 bp, Bacteroides forsythus
agtttgcgatatagtgtaag

SEQ ID NO: 43673 - DNA, 20 bp, Lactococcus lactis
cggtaactacccagaaaggg

SEQ ID NO: 43674 - DNA, 20 bp, Bacteroides thetaiotaomicron
ccttatcttcagttactaac

SEQ ID NO: 43675 - DNA, 20 bp, Sphingobacterium multivorum
agatgggctcgcgtgacatt

SEQ ID NO: 43676 - DNA, 20 bp, Anaerococcus tetradius
gtacgtaggcggcctagtaa

SEQ ID NO: 43677 - DNA, 20 bp, Prevotella melaninogenica
atggtgtaatgcaaattgca

SEQ ID NO: 43678 - DNA, 20 bp, Vibrio hollisae
atgggagtggaatccgccag

SEQ ID NO: 43679 - DNA, 20 bp, Peptostreptococcus anaerobius
tgataatatatatttacggc

SEQ ID NO: 43680 - DNA, 20 bp, Propionibacterium freudenreichii
tttttggctggtacacaggt

SEQ ID NO: 43681 - DNA, 20 bp, Veillonella sp.
agttaatagacggaagcgag

SEQ ID NO: 43682 - DNA, 20 bp, Bacillus oleronius
atcctcttgacctccctaga

SEQ ID NO: 43683 - DNA, 20 bp, Bacillus alcalophilus
cttgctcccagaggttagcg

SEQ ID NO: 43684 - DNA, 20 bp, Oligella urethralis
ccgtcagcatcttaaggtat

SEQ ID NO: 43685 - DNA, 20 bp, Plesiomonas shigelloides
gctatcggatgaacccaggt

SEQ ID NO: 43686 - DNA, 20 bp, Plesiomonas shigelloides
aatgaccagtcacactggaa

SEQ ID NO: 43687 - DNA, 20 bp, Prevotella bivia
ttgagtgcgcacaacgtagg

SEQ ID NO: 43688 - DNA, 20 bp, Streptococcus thermophilus
catttatttgaaaggggcaa

SEQ ID NO: 43689 - DNA, 20 bp, Bacteroides thetaiotaomicron
caccaaaccttcgatggata

SEQ ID NO: 43690 - DNA, 20 bp, Anaerobiospirillum succiniciproducens
catgtaggcggaaaggtaag

SEQ ID NO: 43691 - DNA, 20 bp, Brevibacillus choshinensis
gcgcgaatcccttaaaacca

SEQ ID NO: 43692 - DNA, 20 bp, Helcococcus ovis
taattaagttaaagaatttc

SEQ ID NO: 43693 - DNA, 20 bp, Vibrio hollisae
ccgccagaagtgggtagggt

SEQ ID NO: 43694 - DNA, 20 bp, Veillonella dispar
cctcggcatcgaggatagat

SEQ ID NO: 43695 - DNA, 20 bp, Acinetobacter genospecies 3
tgtcgggaactttaaggata

SEQ ID NO: 43696 - DNA, 20 bp, Proteus vulgaris
atttagaggttgtggtcttg

SEQ ID NO: 43697 - DNA, 20 bp, Tetragenococcus halophilus
gctaataccgcatatggctt

SEQ ID NO: 43698 - DNA, 20 bp, Weissella paramesenteroides
aaccgcatggttgttggttg

SEQ ID NO: 43699 - DNA, 20 bp, Citrobacter sedlakii
tgacatccacggaagactgc

SEQ ID NO: 43700 - DNA, 20 bp, Gemella bergeri
caacacagatacaggtggtg

SEQ ID NO: 43701 - DNA, 20 bp, Pseudoramibacter alactolyticus
aaattagaactggaaagtgg

SEQ ID NO: 43702 - DNA, 20 bp, Fusobacterium nucleatum
cctaatattatgataatagg

SEQ ID NO: 43703 - DNA, 20 bp, Acinetobacter radioresistens
agattaatactttaggatag

SEQ ID NO: 43704 - DNA, 20 bp, Pediococcus dextrinicus
cgtaagggagctagccgtct

SEQ ID NO: 43705 - DNA, 20 bp, Helcococcus kunzii
gaatttcggtgaaagatggt

SEQ ID NO: 43706 - DNA, 20 bp, Moraxella osloensis
tgctagagatgattagtggc

SEQ ID NO: 43707 - DNA, 20 bp, Brevibacillus choshinensis
actccaatcctcagtgccgc

SEQ ID NO: 43708 - DNA, 20 bp, Corynebacterium glucuronolyticum
ggagctaatcgcgaaagcca

SEQ ID NO: 43709 - DNA, 20 bp, Anaerobiospirillum succiniciproducens
aaacgataccgtgaggtgga

SEQ ID NO: 43710 - DNA, 20 bp, Dermabacter hominis
agagatgtggttttctttgg

SEQ ID NO: 43711 - DNA, 20 bp, Neisseria subflava
ctaacatcagcggctgatga

SEQ ID NO: 43712 - DNA, 20 bp, Corynebacterium amycolatum
ttgacatatacaggatcgcg

SEQ ID NO: 43713 - DNA, 20 bp, Fusobacterium nucleatum
atgagacagagatgtttcag

SEQ ID NO: 43714 - DNA, 20 bp, Weeksella virosa
tgccagcgtttaaagacggg

SEQ ID NO: 43715 - DNA, 20 bp, Campylobacter rectus
agattaagtagcttgctatt

SEQ ID NO: 43716 - DNA, 20 bp, Helcococcus kunzii
gccctatatgtcttgggcta

SEQ ID NO: 43717 - DNA, 20 bp, Stenotrophomonas maltophilia
ttaatacccggttgggatga

SEQ ID NO: 43718 - DNA, 20 bp, Clostridium paraputrificum
aagttggtgatctaacccgt

SEQ ID NO: 43719 - DNA, 20 bp, Fusobacterium mortiferum
gcgcgtctaggcggtttggt

SEQ ID NO: 43720 - DNA, 20 bp, Bacillus lentus
aagcttcttattggttcgct

SEQ ID NO: 43721 - DNA, 20 bp, Alicyclobacillus acidocaldarius
ccttcccccgcaagaagatg

SEQ ID NO: 43722 - DNA, 20 bp, Tissierella praeacuta
caacgagcagctacttagcg

SEQ ID NO: 43723 - DNA, 20 bp, Oligella urethralis
tagcctaagacttttcttcg

SEQ ID NO: 43724 - DNA, 20 bp, Bacillus circulans
aaaagctgaaagacggttta

SEQ ID NO: 43725 - DNA, 20 bp, Tetragenococcus halophilus
ctctgttgtcagcaaagaac

SEQ ID NO: 43726 - DNA, 20 bp, Streptococcus constellatus
tgcaagtagaacgcacagga

SEQ ID NO: 43727 - DNA, 20 bp, Fusobacterium mortiferum
taataccggatattatgtga

SEQ ID NO: 43728 - DNA, 20 bp, Facklamia languida
tgttagagaagaacgaccgg

SEQ ID NO: 43729 - DNA, 20 bp, Corynebacterium glucuronolyticum
tcgcgaaagccagtctcagt

SEQ ID NO: 43730 - DNA, 20 bp, Oligella ureolytica
gaaaagtcttaggctaatac

SEQ ID NO: 43731 - DNA, 20 bp, Paenibacillus lautus
ccaaggaagaacgtcttcta

SEQ ID NO: 43732 - DNA, 20 bp, Bacteroides capilosus
ctgccaaagatttatcgctc

SEQ ID NO: 43733 - DNA, 20 bp, Peptostreptococcus anaerobius
caaccgcaaggaggaagtcg

SEQ ID NO: 43734 - DNA, 20 bp, Bacteroides vulgatus
taccacgcgagtggatgcca

SEQ ID NO: 43735 - DNA, 20 bp, Pasteurella trehalosi
aaagcaattgacgttagtca

SEQ ID NO: 43736 - DNA, 20 bp, Fusobacterium varium
aagaagttaacagagatgtt

SEQ ID NO: 43737 - DNA, 20 bp, Facklamia ignava
cctacgggacaagaagacag

SEQ ID NO: 43738 - DNA, 20 bp, Clostridium innocuum
ctcataaaggtcgtctcagt

SEQ ID NO: 43739 - DNA, 20 bp, Tissierella praeacuta
cggaatgaaactttaattat

SEQ ID NO: 43740 - DNA, 20 bp, Neisseria elongata
tttctgctgacggtacctaa

SEQ ID NO: 43741 - DNA, 20 bp, Oligella urethralis
tcgtcccacacgcgagatgg

SEQ ID NO: 43742 - DNA, 20 bp, Moraxella osloensis
gaacgatgactctctagctt

SEQ ID NO: 43743 - DNA, 20 bp, Bacillus pumilus
gttcaaggatgaaagacggt

SEQ ID NO: 43744 - DNA, 20 bp, Streptococcus salivarius
tgtaagtcaagaacgagtgt

SEQ ID NO: 43745 - DNA, 20 bp, Propionibacterium freudenreichii
cttgacttcggtatagctcc

SEQ ID NO: 43746 - DNA, 20 bp, Campylobacter curvus
gttgttgctaagctagtctt

SEQ ID NO: 43747 - DNA, 20 bp, Anaerobiospirillum succiniciproducens
ggtaaagctgggaactcaaa

SEQ ID NO: 43748 - DNA, 20 bp, Acinetobacter genospecies 3
agtcgagcggagagaggtag

SEQ ID NO: 43749 - DNA, 20 bp, Staphylococcus aureus
tagctaatgcagcgcggatc

SEQ ID NO: 43750 - DNA, 20 bp, Delftia acidovorans
agttttctcagtaacgaagc

SEQ ID NO: 43751 - DNA, 20 bp, Oligella urethralis
ctcaactaccgtcagcatct

SEQ ID NO: 43752 - DNA, 20 bp, Salmonella enteritidis
atccagagatggatttgtgc

SEQ ID NO: 43753 - DNA, 20 bp, Bacillus pallidus
acaccgaaaaccgcatggtt

SEQ ID NO: 43754 - DNA, 20 bp, Leptotrichia buccalis
tttgcacctgaagccgccgg

SEQ ID NO: 43755 - DNA, 20 bp, Streptococcus bovis
ctactttagcttgctagagt

SEQ ID NO: 43756 - DNA, 20 bp, Alcaligenes faecalis
agctgttggggccgttaggc

SEQ ID NO: 43757 - DNA, 20 bp, Campylobacter rectus
ctagttgttgcttcgctagt

SEQ ID NO: 43758 - DNA, 20 bp, Brochothrix campestris
agctggggataacatcgaga

SEQ ID NO: 43759 - DNA, 20 bp, Actinomyces turicensis
ctcatggcctaaccggtttt

SEQ ID NO: 43760 - DNA, 20 bp, Microbacterium hominis
tcagtagctggaaagatttt

SEQ ID NO: 43761 - DNA, 20 bp, Prevotella bivia
acctagtgttagcggctaag

SEQ ID NO: 43762 - DNA, 20 bp, Enterobacter amnigenus
gcggacctcacaaagtatgt

SEQ ID NO: 43763 - DNA, 20 bp, Leptotrichia buccalis
acaggcagtgccttcgggaa

SEQ ID NO: 43764 - DNA, 20 bp, Streptococcus agalactiae
gtaattaacacatgttagtt

SEQ ID NO: 43765 - DNA, 20 bp, Anaerobiospirillum succiniciproducens
gcccttacggtcagggctac

SEQ ID NO: 43766 - DNA, 20 bp, Pasteurella multocida
ttaaatagatagcatcattg

SEQ ID NO: 43767 - DNA, 20 bp, Shewanella algae
ggtgtaagttaataccttac

SEQ ID NO: 43768 - DNA, 20 bp, Lactococcus garvieae
gatgatcccgcgttgtatta

SEQ ID NO: 43769 - DNA, 20 bp, Moraxella osloensis
gggcgcaagctcttgctatt

SEQ ID NO: 43770 - DNA, 20 bp, Helcococcus kunzii
taagaagcaagccctggcta

SEQ ID NO: 43771 - DNA, 20 bp, Paenibacillus macerans
tatcaaagctggtctcagtt

SEQ ID NO: 43772 - DNA, 20 bp, Acinetobacter haemolyticus
gctgattaagtcggatgtga

SEQ ID NO: 43773 - DNA, 20 bp, Streptococcus sanguinis
taattaattgaaaggtgcaa

SEQ ID NO: 43774 - DNA, 20 bp, Streptococcus parasanguinis
gacattgcatgatgttgact

SEQ ID NO: 43775 - DNA, 20 bp, Shewanella algae
ggccttgcgctgatggataa

SEQ ID NO: 43776 - DNA, 20 bp, Streptococcus canis
gaaaacccattatgtgacgg

SEQ ID NO: 43777 - DNA, 20 bp, Campylobacter rectus
tagtcgaggcagtaatgcac

SEQ ID NO: 43778 - DNA, 20 bp, Staphylococcus aureus
gaacggacgagaagcttgct

SEQ ID NO: 43779 - DNA, 20 bp, Bacillus marinus
cccggtctagagatagactt

SEQ ID NO: 43780 - DNA, 20 bp, Prevotella disiens
atgcccgctgttagcacctg

SEQ ID NO: 43781 - DNA, 20 bp, Propionibacterium freudenreichii
gagcctggcctgcatgggtc

SEQ ID NO: 43782 - DNA, 20 bp, Porphyromonas endodontalis
actctatcgagacagccgtg

SEQ ID NO: 43783 - DNA, 20 bp, Streptococcus pyogenes
aactggtgcttgcaccggtt

SEQ ID NO: 43784 - DNA, 20 bp, Prevotella intermedia
gcggtctgttaagcgtgttg

SEQ ID NO: 43785 - DNA, 20 bp, Peptostreptococcus anaerobius
cccgaagccgattatccaac

SEQ ID NO: 43786 - DNA, 20 bp, Aerococcus viridans
gaagattgaaagacggctct

SEQ ID NO: 43787 - DNA, 20 bp, Bacteroides stercoris
accaaacctacgatggatag

SEQ ID NO: 43788 - DNA, 20 bp, Weissella paramesenteroides
agcttgctctgatttgattt

SEQ ID NO: 43789 - DNA, 20 bp, Propionibacterium freudenreichii
ggcgtgcctttttggctggt

SEQ ID NO: 43790 - DNA, 20 bp, Moraxella  catarrhalis
gcttctgatacttagtggcg

SEQ ID NO: 43791 - DNA, 20 bp, Streptococcus agalactiae
taataccgcataagagtaat

SEQ ID NO: 43792 - DNA, 20 bp, Bacteroides forsythus
agagatcacgcagaactccg

SEQ ID NO: 43793 - DNA, 20 bp, Eubacterium moniliforme
aacacctctgtgccgccgct

SEQ ID NO: 43794 - DNA, 20 bp, Actinomyces neuii
gcactaggtgtgggggctgg

SEQ ID NO: 43795 - DNA, 20 bp, Bacteroides capilosus
  misc_feature (5)..(5): n is a, c, g, or t
tactngatgaataagccacg

SEQ ID NO: 43796 - DNA, 20 bp, Moraxella nonliquefaciens
cacgtaggtggttatttaag

SEQ ID NO: 43797 - DNA, 20 bp, Streptococcus constellatus
agatgtttaaaaggtgcaag

SEQ ID NO: 43798 - DNA, 20 bp, Stenotrophomonas maltophilia
ggcgactagaatgtggtaga

SEQ ID NO: 43799 - DNA, 20 bp, Leuconostoc lactis
tcaggtagtgacggtatcca

SEQ ID NO: 43800 - DNA, 20 bp, Fusobacterium nucleatum
gatattatgattttaaggca

SEQ ID NO: 43801 - DNA, 20 bp, Clostridium clostridiiforme
cactgggggataacagttag

SEQ ID NO: 43802 - DNA, 20 bp, Methylobacterium mesophilicum
ttatggggagagattcccag

SEQ ID NO: 43803 - DNA, 20 bp, Pediococcus pentosaceus
gagattttaacacgaagtga

SEQ ID NO: 43804 - DNA, 20 bp, Haemophilus segnis
taatagactaggtgattgac

SEQ ID NO: 43805 - DNA, 20 bp, Bacillus schlegellii
cctggcgactggggtgaagt

SEQ ID NO: 43806 - DNA, 20 bp, Staphylococcus auricularis
catggttctacagtgaaagg

SEQ ID NO: 43807 - DNA, 20 bp, Gemella bergeri
aggagccggtcacggtggga

SEQ ID NO: 43808 - DNA, 20 bp, Actinomyces bovis
atatgacggtaccttaccag

SEQ ID NO: 43809 - DNA, 20 bp, Bacteroides capilosus
tgaaaaccacgggctcaacc

SEQ ID NO: 43810 - DNA, 20 bp, Moraxella lacunata
ccgcatacgtcttacgagag

SEQ ID NO: 43811 - DNA, 20 bp, Streptococcus thermophilus
ccgagcggatgagttgcgaa

SEQ ID NO: 43812 - DNA, 20 bp, Gemella bergeri
tgtagtaactatacacaaaa

SEQ ID NO: 43813 - DNA, 20 bp, Proteus mirabilis
atacccttatcaattgacgt

SEQ ID NO: 43814 - DNA, 20 bp, Corynebacterium propinquum
gccttttggggtttctgtgc

SEQ ID NO: 43815 - DNA, 20 bp, Gemella sanguinis
ctatatacagtagagacggt

SEQ ID NO: 43816 - DNA, 20 bp, Tissierella praeacuta
gtacaggggacacaggtggt

SEQ ID NO: 43817 - DNA, 20 bp, Leuconostoc lactis
attgataaacatttgagtga

SEQ ID NO: 43818 - DNA, 20 bp, Microbacterium hominis
gcgatcgcatggtcagtagc

SEQ ID NO: 43819 - DNA, 20 bp, Campylobacter rectus
tccttttcttgggaaagaat

SEQ ID NO: 43820 - DNA, 20 bp, Abiotrophia defectiva
catagagtaactgttatgcg

SEQ ID NO: 43821 - DNA, 20 bp, Enterococcus raffinosus
ggccttgctatcacttatag

SEQ ID NO: 43822 - DNA, 20 bp, Streptococcus sobrinus
gggagcgcaggcggtttagt

SEQ ID NO: 43823 - DNA, 20 bp, Kytococcus sedentarius
aattcagggcttaaccctgg

SEQ ID NO: 43824 - DNA, 20 bp, Clostridium ramosum
gaggatggacttatggcgca

SEQ ID NO: 43825 - DNA, 20 bp, Clostridium ramosum
acttcagtaagccatagaaa

SEQ ID NO: 43826 - DNA, 20 bp, Bacteroides forsythus
cgtaaccgcgaggatcggcc

SEQ ID NO: 43827 - DNA, 20 bp, Neisseria lactamica
cttacccggttttgacatgt

SEQ ID NO: 43828 - DNA, 20 bp, Corynebacterium glucuronolyticum
actgggtctaataccctata

SEQ ID NO: 43829 - DNA, 20 bp, Prevotella melaninogenica
tcgaggggaaacggcattga

SEQ ID NO: 43830 - DNA, 20 bp, Enterococcus gallinarum
gagagtaaaacgttcatccc

SEQ ID NO: 43831 - DNA, 20 bp, Moraxella  catarrhalis
tgcaagtcgaacgaagttag

SEQ ID NO: 43832 - DNA, 20 bp, Clostridium clostridiiforme
cggcgaagcaagtctgaagt

SEQ ID NO: 43833 - DNA, 20 bp, Paenibacillus apiarius
catgacttgagtacagaaga

SEQ ID NO: 43834 - DNA, 20 bp, Gemella haemolysans
cataagagatcagtgctgca

SEQ ID NO: 43835 - DNA, 20 bp, Campylobacter rectus
tcttgggaaagaattatgac

SEQ ID NO: 43836 - DNA, 20 bp, Bacteroides thetaiotaomicron
ctggctgtcttgagtacagt

SEQ ID NO: 43837 - DNA, 20 bp, Moraxella osloensis
tactggtggtgctagaatat

SEQ ID NO: 43838 - DNA, 20 bp, Campylobacter sputorum
ttaggctgagcactctaaac

SEQ ID NO: 43839 - DNA, 20 bp, Alloiococcus otitis
atttggagccagccgtcgaa

SEQ ID NO: 43840 - DNA, 20 bp, Abiotrophia defectiva
ttagagaagaacagcgcata

SEQ ID NO: 43841 - DNA, 20 bp, Fusobacterium nucleatum
gtagggacaacatttggaaa

SEQ ID NO: 43842 - DNA, 20 bp, Capnocytophaga ochracea
acaatggtcggaagactgat

SEQ ID NO: 43843 - DNA, 20 bp, Facklamia ignava
gctggcgcaaacgcaataaa

SEQ ID NO: 43844 - DNA, 20 bp, Porphyromonas levii
tggtcttgaatggttgtgaa

SEQ ID NO: 43845 - DNA, 20 bp, Corynebacterium glucuronolyticum
tcgtcagggacgaagttttt

SEQ ID NO: 43846 - DNA, 20 bp, Haemophilus segnis
cgtatacagagggcgacgaa

SEQ ID NO: 43847 - DNA, 20 bp, Prevotella oralis
aatactgccgccgtaaggtg

SEQ ID NO: 43848 - DNA, 20 bp, Bacillus licheniformis
gggttcaatcataaaaggtg

SEQ ID NO: 43849 - DNA, 20 bp, Facklamia hominis
gagtaactgttagcggagtg

SEQ ID NO: 43850 - DNA, 20 bp, Actinomyces neuii
acgtcgtgtgggggatgaag

SEQ ID NO: 43851 - DNA, 20 bp, Campylobacter sputorum
gaacaacacttagaaatgag

SEQ ID NO: 43852 - DNA, 20 bp, Peptoniphilus indolicus
gtaaagatgggaactctaaa

SEQ ID NO: 43853 - DNA, 20 bp, Actinomyces neuii
tgttgatggtagtgggtaaa

SEQ ID NO: 43854 - DNA, 20 bp, Bacteroides forsythus
gcggtgaaagtttgtcgctt

SEQ ID NO: 43855 - DNA, 20 bp, Clostridium sordellii
agcttttggaactgtaggac

SEQ ID NO: 43856 - DNA, 20 bp, Corynebacterium xerosis
ctcctttcaccatcgacgaa

SEQ ID NO: 43857 - DNA, 20 bp, Gemella morbillorum
ttctggtgcttgcactagaa

SEQ ID NO: 43858 - DNA, 20 bp, Tissierella praeacuta
cacttaaatgtcgcatgaga

SEQ ID NO: 43859 - DNA, 20 bp, Moraxella bovis
cacaagccctgacgttacct

SEQ ID NO: 43860 - DNA, 20 bp, Comamonas terrigena
gcatgagaactgaggttgaa

SEQ ID NO: 43861 - DNA, 20 bp, Bacteroides merdae
tcaatggccgagaggctgaa

SEQ ID NO: 43862 - DNA, 20 bp, Campylobacter concisus
aaagggttttactggttttg

SEQ ID NO: 43863 - DNA, 20 bp, Prevotella denticola
ttgcatccaatcttgaaagc

SEQ ID NO: 43864 - DNA, 20 bp, Klebsiella oxytoca
agtgaggttaataaccttat

SEQ ID NO: 43865 - DNA, 20 bp, Prevotella melaninogenica
gcccgctgttggtacctggt

SEQ ID NO: 43866 - DNA, 20 bp, Actinomyces turicensis
gagcgaatcacttaaagcca

SEQ ID NO: 43867 - DNA, 20 bp, Anaerococcus prevotii
tctttagttaccagcatttc

SEQ ID NO: 43868 - DNA, 20 bp, Veillonella dispar
gaggatagatgaaaggtggc

SEQ ID NO: 43869 - DNA, 20 bp, Campylobacter rectus
tctttacataagttaagtcg

SEQ ID NO: 43870 - DNA, 20 bp, Methylobacterium mesophilicum
tggggagagattcccagtcc

SEQ ID NO: 43871 - DNA, 20 bp, Propionibacterium acnes
cagagagtggcgagcctgtg

SEQ ID NO: 43872 - DNA, 20 bp, Paenibacillus larvae
ataacttgcggaaacgtgag

SEQ ID NO: 43873 - DNA, 20 bp, Capnocytophaga sp.
tagcgagtcaagtcgagcac

SEQ ID NO: 43874 - DNA, 20 bp, Granulicatella elegans
agatagagcattcccttcgg

SEQ ID NO: 43875 - DNA, 20 bp, Bacteroides capilosus
gggcgcggccgaaggtgggt

SEQ ID NO: 43876 - DNA, 20 bp, Paenibacillus lautus
tgtggaataatgaaagacgg

SEQ ID NO: 43877 - DNA, 20 bp, Brevibacillus choshinensis
atgaagagcttgctcttcgg

SEQ ID NO: 43878 - DNA, 20 bp, Streptococcus agalactiae
agaacgctgaggtttggtgt

SEQ ID NO: 43879 - DNA, 20 bp, Virgibacillus pantothenticus
gaataggttggcaccttgac

SEQ ID NO: 43880 - DNA, 20 bp, Tetragenococcus halophilus
gaaagaggaaatgctttttc

SEQ ID NO: 43881 - DNA, 20 bp, Anaerobiospirillum succiniciproducens
accgcatactcccttcgggg

SEQ ID NO: 43882 - DNA, 20 bp, Pasteurella aerogenes
ggtgcatacagagagcgacg

SEQ ID NO: 43883 - DNA, 20 bp, Enterobacter cloacae
cgacagggttaataaccctg

SEQ ID NO: 43884 - DNA, 20 bp, Budvicia aquatica
ggaggttgtgggcatgaccc

SEQ ID NO: 43885 - DNA, 20 bp, Moraxella atlantae
tgacactcagacccgaaagc

SEQ ID NO: 43886 - DNA, 20 bp, Proteus vulgaris
tgcatctgaaactggttggc

SEQ ID NO: 43887 - DNA, 20 bp, Streptococcus infantarius
tctcacacacattcttctct

SEQ ID NO: 43888 - DNA, 20 bp, Bacillus oleronius
gagggagaattgaaagatgg

SEQ ID NO: 43889 - DNA, 20 bp, Clostridium ramosum
aggtcttgacatactcataa

SEQ ID NO: 43890 - DNA, 20 bp, Escherichia hermannii
ttgccatcagatgaacccag

SEQ ID NO: 43891 - DNA, 20 bp, Acinetobacter junii
aagtcgagcggagatgaggt

SEQ ID NO: 43892 - DNA, 20 bp, Clostridium ramosum
gcaggagaggatcgtggaat

SEQ ID NO: 43893 - DNA, 20 bp, Corynebacterium pseudotuberculosis
tggataggaccgcactttag

SEQ ID NO: 43894 - DNA, 20 bp, Pseudomonas fluorescens
gaggaagggtacttacctaa

SEQ ID NO: 43895 - DNA, 20 bp, Clostridium tetani
aaaccctgttttctgggacg

SEQ ID NO: 43896 - DNA, 20 bp, Facklamia languida
gttgttagagaagaacgacc

SEQ ID NO: 43897 - DNA, 20 bp, Virgibacillus pantothenticus
gttgaaaggcggcatatgct

SEQ ID NO: 43898 - DNA, 20 bp, Bacteroides thetaiotaomicron
caccaagactacgatggata

SEQ ID NO: 43899 - DNA, 20 bp, Gemella haemolysans
gttttgctaacactatgaga

SEQ ID NO: 43900 - DNA, 20 bp, Weeksella virosa
gcttaacgatagaactgcca

SEQ ID NO: 43901 - DNA, 20 bp, Clostridium tetani
aggtggggttaatgattggg

SEQ ID NO: 43902 - DNA, 20 bp, Virgibacillus pantothenticus
gatctccttcgggggtgacg

SEQ ID NO: 43903 - DNA, 20 bp, Lactococcus lactis
ggaatctgcctttgagcggg

SEQ ID NO: 43904 - DNA, 20 bp, Bacillus simplex
acgttcttttctcgcatgag

SEQ ID NO: 43905 - DNA, 20 bp, Streptococcus thermophilus
caattgctccactacaagat

SEQ ID NO: 43906 - DNA, 20 bp, Actinomyces bovis
tgtaagggaagaacgatagg

SEQ ID NO: 43907 - DNA, 20 bp, Anaerobiospirillum succiniciproducens
agcgtcccgcagttcggatt

SEQ ID NO: 43908 - DNA, 20 bp, Actinomyces neuii
tggatgttccggcttcctcg

SEQ ID NO: 43909 - DNA, 20 bp, Streptococcus hyovaginalis
cgggagtaagagtggaaagt

SEQ ID NO: 43910 - DNA, 20 bp, Collinsella aerofaciens
ggacgatccccccgtgccgc

SEQ ID NO: 43911 - DNA, 20 bp, Leptotrichia buccalis
atgattactgggtgtgggca

SEQ ID NO: 43912 - DNA, 20 bp, Facklamia sourekii
cttgtttctcttgacgtgag

SEQ ID NO: 43913 - DNA, 20 bp, Anaerococcus tetradius
agttaagcaaaactcaaaaa

SEQ ID NO: 43914 - DNA, 20 bp, Helcococcus ovis
gcatgataattaagttaaag

SEQ ID NO: 43915 - DNA, 20 bp, Anaerococcus prevotii
cggggtgaagataagatgga

SEQ ID NO: 43916 - DNA, 20 bp, Microbacterium terregens
gtcccgcaatgagcgcaacc

SEQ ID NO: 43917 - DNA, 20 bp, Enterococcus gallinarum
agagtagaacgttcatccct

SEQ ID NO: 43918 - DNA, 20 bp, Pseudomonas fluorescens
ggaagggtacttacctaata

SEQ ID NO: 43919 - DNA, 20 bp, Corynebacterium hoagii
cctgtcgcatggcgggggtt

SEQ ID NO: 43920 - DNA, 20 bp, Peptoniphilus indolicus
tcaaagtgaattagcggtca

SEQ ID NO: 43921 - DNA, 20 bp, Fusobacterium varium
agagagctgcaaacctgcga

SEQ ID NO: 43922 - DNA, 20 bp, Prevotella melaninogenica
actcaatggacgtcgaccgg

SEQ ID NO: 43923 - DNA, 20 bp, Brevibacillus choshinensis
cgtggagggccacttgaaac

SEQ ID NO: 43924 - DNA, 20 bp, Bacteroides uniformis
gaatttcggtcatcgatggg

SEQ ID NO: 43925 - DNA, 20 bp, Campylobacter concisus
tttactggttttggatgggc

SEQ ID NO: 43926 - DNA, 20 bp, Bacillus pumilus
gccaatcccataaatctgtt

SEQ ID NO: 43927 - DNA, 20 bp, Stenotrophomonas maltophilia
ggctaatacccggttgggat

SEQ ID NO: 43928 - DNA, 20 bp, Tissierella praeacuta
ataagctgagcactctagag

SEQ ID NO: 43929 - DNA, 20 bp, Alcaligenes faecalis
tactgctgacggtatctgca

SEQ ID NO: 43930 - DNA, 20 bp, Alicyclobacillus acidocaldarius
agacttgctcgaccgcctac

SEQ ID NO: 43931 - DNA, 20 bp, Bacteroides distasonis
aagcggcacagcgaaagcgt

SEQ ID NO: 43932 - DNA, 20 bp, Bacillus oleronius
gggagaattgaaagatggct

SEQ ID NO: 43933 - DNA, 20 bp, Haemophilus paraphrophilus
ggtgacgaggaaggttgttg

SEQ ID NO: 43934 - DNA, 20 bp, Neisseria polysaccharea
tatcagcggctgatgacggt

SEQ ID NO: 43935 - DNA, 20 bp, Kingella denitrificans
ggaagaaaagggaagtgtta

SEQ ID NO: 43936 - DNA, 20 bp, Proteus vulgaris
gaattgcatctgaaactggt

SEQ ID NO: 43937 - DNA, 20 bp, Bacteroides thetaiotaomicron
gggaataaagttttccacgt

SEQ ID NO: 43938 - DNA, 20 bp, Bacillus alcalophilus
taatcaaaggaatcacatgg

SEQ ID NO: 43939 - DNA, 20 bp, Neisseria meningitidis
tctctctcaagacgtatgcg

SEQ ID NO: 43940 - DNA, 20 bp, Actinomyces bovis
ggtttatcaagtttatggtt

SEQ ID NO: 43941 - DNA, 20 bp, Virgibacillus pantothenticus
aaaggcggcatatgctgtca

SEQ ID NO: 43942 - DNA, 20 bp, Prevotella corporis
ggcagactaataccttatgt

SEQ ID NO: 43943 - DNA, 20 bp, Moraxella osloensis
catttaggaatctacctagt

SEQ ID NO: 43944 - DNA, 20 bp, Staphylococcus auricularis
atgcgtaagtaactgtgcgc

SEQ ID NO: 43945 - DNA, 20 bp, Campylobacter lari
gttggggtgctagtcatctc

SEQ ID NO: 43946 - DNA, 20 bp, Unknown Organism
  oligonucleotide from CDC group EF-4B
cactttgagaaggaaagcag

SEQ ID NO: 43947 - DNA, 20 bp, Delftia acidovorans
ctggttgttgggaattagtt

SEQ ID NO: 43948 - DNA, 20 bp, Bacillus halodurans
gaccaaagggagcttgctcc

SEQ ID NO: 43949 - DNA, 20 bp, Streptococcus acidominimus
acgggagtaagagtggaaaa

SEQ ID NO: 43950 - DNA, 20 bp, Tetragenococcus halophilus
acctatccatcagcggggga

SEQ ID NO: 43951 - DNA, 20 bp, Photobacterium damselae
agttaacacctgcattattt

SEQ ID NO: 43952 - DNA, 20 bp, Tetragenococcus halophilus
cgaatctctgaaagcttctc

SEQ ID NO: 43953 - DNA, 20 bp, Tissierella praeacuta
ctaacagataagctgagcac

SEQ ID NO: 43954 - DNA, 20 bp, Alcaligenes faecalis
gccgaagagatttggccgtg

SEQ ID NO: 43955 - DNA, 20 bp, Bacteroides forsythus
actaggagtttgcgatatag

SEQ ID NO: 43956 - DNA, 20 bp, Weissella paramesenteroides
tggcatatacaacgagtcgc

SEQ ID NO: 43957 - DNA, 20 bp, Bacillus pumilus
gcatggttcaaggatgaaag

SEQ ID NO: 43958 - DNA, 20 bp, Clostridium sordellii
ttcaagccagaagtgaaagg

SEQ ID NO: 43959 - DNA, 20 bp, Paenibacillus amylolyticus
ggtagagtaactgctatcgg

SEQ ID NO: 43960 - DNA, 20 bp, Sporosarcina ureae
tgccgcgtgagtgaagaagg

SEQ ID NO: 43961 - DNA, 20 bp, Clostridium ramosum
gtaacctgccctagacaggg

SEQ ID NO: 43962 - DNA, 20 bp, Fusobacterium varium
acagagagctgcaaacctgc

SEQ ID NO: 43963 - DNA, 20 bp, Leuconostoc lactis
aaggctcaccaagaccgtga

SEQ ID NO: 43964 - DNA, 20 bp, Eubacterium moniliforme
tcccattagatagttggtga

SEQ ID NO: 43965 - DNA, 20 bp, Streptococcus thoraltensis
gtgacagtaagctaatctct

SEQ ID NO: 43966 - DNA, 20 bp, Peptostreptococcus anaerobius
tttactaatacatgataata

SEQ ID NO: 43967 - DNA, 20 bp, Bordetella bronchiseptica
caggaaagaaacggcacggg

SEQ ID NO: 43968 - DNA, 20 bp, Leuconostoc lactis
agtcgaacgcactctcgttt

SEQ ID NO: 43969 - DNA, 20 bp, Anaerococcus tetradius
gactttctggtcatcatctg

SEQ ID NO: 43970 - DNA, 20 bp, Paenibacillus pabuli
gtacaacgggctgtgaagcc

SEQ ID NO: 43971 - DNA, 20 bp, Peptoniphilus indolicus
tgagtgctaggtgtcggagt

SEQ ID NO: 43972 - DNA, 20 bp, Neisseria flavescens
taatatcgacagctgatgac

SEQ ID NO: 43973 - DNA, 20 bp, Prevotella loescheii
cccgtcttcagttgccatcg

SEQ ID NO: 43974 - DNA, 20 bp, Aerococcus viridans
ataccgcataatatcttctt

SEQ ID NO: 43975 - DNA, 20 bp, Prevotella melaninogenica
cagaggaaggatttagagat

SEQ ID NO: 43976 - DNA, 20 bp, Fusobacterium varium
atattatgactgagtcgcat

SEQ ID NO: 43977 - DNA, 20 bp, Brevibacillus choshinensis
gctcttcggcggttagcggc

SEQ ID NO: 43978 - DNA, 20 bp, Prevotella oris
ggggataaagtgagggacgt

SEQ ID NO: 43979 - DNA, 20 bp, Streptococcus mitis
gatgttgcatgacatttgct

SEQ ID NO: 43980 - DNA, 20 bp, Streptococcus thermophilus
gctccactacaagatggacc

SEQ ID NO: 43981 - DNA, 20 bp, Bacteroides fragilis
gtcgaggggcatcaggaaga

SEQ ID NO: 43982 - DNA, 20 bp, Bacteroides merdae
ctaatctccaaaccatgtct

SEQ ID NO: 43983 - DNA, 20 bp, Actinomyces neuii
tgggaaaggttttttctgga

SEQ ID NO: 43984 - DNA, 20 bp, Dermabacter hominis
gtggttttctttggactggt

SEQ ID NO: 43985 - DNA, 20 bp, Methylobacterium extorquens
gttacctcgagagatcgggg

SEQ ID NO: 43986 - DNA, 20 bp, Bacteroides uniformis
gtcagccgcaaggcagttgt

SEQ ID NO: 43987 - DNA, 20 bp, Gemella bergeri
ctgttgttagggaagaaagg

SEQ ID NO: 43988 - DNA, 20 bp, Clostridium septicum
gtatcaactccttccgtgcc

SEQ ID NO: 43989 - DNA, 20 bp, Prevotella buccae
cggcctagggcaaaaccggg

SEQ ID NO: 43990 - DNA, 20 bp, Campylobacter concisus
atacaccggaccgggccaga

SEQ ID NO: 43991 - DNA, 20 bp, Enterococcus cecorum
aagccaatctcttaaagctc

SEQ ID NO: 43992 - DNA, 20 bp, Citrobacter sedlakii
aagactgcagagatgcggtt

SEQ ID NO: 43993 - DNA, 20 bp, Acinetobacter junii
gaggaggaggctactgagac

SEQ ID NO: 43994 - DNA, 20 bp, Stenotrophomonas maltophilia
gacgactagagtgtggtaga

SEQ ID NO: 43995 - DNA, 20 bp, Corynebacterium propinquum
gctcaaactcgtttagggag

SEQ ID NO: 43996 - DNA, 20 bp, Anaerococcus prevotii
cttcggaagcctcaatacag

SEQ ID NO: 43997 - DNA, 20 bp, Leuconostoc pseudomesenteroides
gtgtcgcatgacacaaagtt

SEQ ID NO: 43998 - DNA, 20 bp, Lactococcus lactis
cataagttttaagtttgaaa

SEQ ID NO: 43999 - DNA, 20 bp, Fusobacterium nucleatum
cgcccaagcaaacgcgataa

SEQ ID NO: 44000 - DNA, 20 bp, Tetragenococcus halophilus
gaacaggagaaagaggaaat

SEQ ID NO: 44001 - DNA, 20 bp, Facklamia ignava
gactaataccgcatagttgt

SEQ ID NO: 44002 - DNA, 20 bp, Bacillus coagulans
gaaaaaggaaaggcggcttc

SEQ ID NO: 44003 - DNA, 20 bp, Fusobacterium mortiferum
caccgatagcgaaggcatat

SEQ ID NO: 44004 - DNA, 20 bp, Enterococcus raffinosus
aaccgcatggtttctatttg

SEQ ID NO: 44005 - DNA, 20 bp, Sporosarcina pasteurii
ttgctccagcactaaggggc

SEQ ID NO: 44006 - DNA, 20 bp, Acinetobacter radioresistens
aggaggctacctagattaat

SEQ ID NO: 44007 - DNA, 20 bp, Campylobacter lari
tcctaagaaccttatagaga

SEQ ID NO: 44008 - DNA, 20 bp, Weeksella virosa
agtcagtggtgaaatcctat

SEQ ID NO: 44009 - DNA, 20 bp, Bacteroides capilosus
taggcgggactgcaagtcag

SEQ ID NO: 44010 - DNA, 20 bp, Streptococcus dysgalactiae
aaggtgcaactgcatcacta

SEQ ID NO: 44011 - DNA, 20 bp, Bacillus oleronius
tcttcgcatgagggagaatt

SEQ ID NO: 44012 - DNA, 20 bp, Bacteroides forsythus
attgaaatgtagacgacgga

SEQ ID NO: 44013 - DNA, 20 bp, Helcococcus kunzii
tacaatggtctgaacaaagc

SEQ ID NO: 44014 - DNA, 20 bp, Paenibacillus amylolyticus
aaccttggttcgcactggaa

SEQ ID NO: 44015 - DNA, 20 bp, Enterococcus raffinosus
gaaaccgcatggtttctatt

SEQ ID NO: 44016 - DNA, 20 bp, Propionibacterium avidum
gacatggactgggagtgctc

SEQ ID NO: 44017 - DNA, 20 bp, Shewanella algae
tgcgctgatggataagccca

SEQ ID NO: 44018 - DNA, 20 bp, Tissierella praeacuta
agctgtcgaaggtagggtca

SEQ ID NO: 44019 - DNA, 20 bp, Streptococcus thermophilus
ggagcttgctcttcttggat

SEQ ID NO: 44020 - DNA, 20 bp, Pediococcus pentosaceus
agtcgaacgaacttccgtta

SEQ ID NO: 44021 - DNA, 20 bp, Prevotella intermedia
gcctgaagttcgtaaccgcg

SEQ ID NO: 44022 - DNA, 20 bp, Prevotella melaninogenica
aggatttagagataatgacg

SEQ ID NO: 44023 - DNA, 20 bp, Bacteroides forsythus
cggactaatacctcataaaa

SEQ ID NO: 44024 - DNA, 20 bp, Clostridium butyricum
ccgcatggtacagcaattaa

SEQ ID NO: 44025 - DNA, 20 bp, Vibrio cholerae
aacttaaccaccttcctccc

SEQ ID NO: 44026 - DNA, 20 bp, Pediococcus acidilactici
cacccagtgacggtatttaa

SEQ ID NO: 44027 - DNA, 20 bp, Aerococcus christensenii
accgataagcgggggacaac

SEQ ID NO: 44028 - DNA, 20 bp, Listeria monocytogenes
tgtggcgcatgccacgcttt

SEQ ID NO: 44029 - DNA, 20 bp, Clostridium clostridiiforme
cgcataagcgcacagggccg

SEQ ID NO: 44030 - DNA, 20 bp, Bacteroides vulgatus
acccgggcttaaattgcaga

SEQ ID NO: 44031 - DNA, 20 bp, Clostridium clostridiiforme
cgcaaacgcagtaagcattc

SEQ ID NO: 44032 - DNA, 20 bp, Brevibacillus choshinensis
gacctttggtcacgtacaga

SEQ ID NO: 44033 - DNA, 20 bp, Sporosarcina pasteurii
cgctgaccggtatagagata

SEQ ID NO: 44034 - DNA, 20 bp, Campylobacter rectus
gagattaagtagcttgctat

SEQ ID NO: 44035 - DNA, 20 bp, Aeromonas hydrophila
ctaatacgtatcaactgtga

SEQ ID NO: 44036 - DNA, 20 bp, Bacillus sp
agccgtgaggccaagcaaat

SEQ ID NO: 44037 - DNA, 20 bp, Pseudomonas fluorescens
acctaatacgtgagtatttt

SEQ ID NO: 44038 - DNA, 20 bp, Helcococcus ovis
taactaagaagcaagccctg

SEQ ID NO: 44039 - DNA, 20 bp, Ralstonia paucula
agaaattgctctggctaata

SEQ ID NO: 44040 - DNA, 20 bp, Atopobium parvulum
gtcgattgcacccgaagtcg

SEQ ID NO: 44041 - DNA, 20 bp, Arcanobacterium bernardiae
ttgagggtatgtgcagaaga

SEQ ID NO: 44042 - DNA, 20 bp, Streptococcus porcinus
agaagacccatgtcatctac

SEQ ID NO: 44043 - DNA, 20 bp, Pseudomonas citronellolis
ctgcatccataactgcctga

SEQ ID NO: 44044 - DNA, 20 bp, Shewanella algae
gttaataccttacatctgtg

SEQ ID NO: 44045 - DNA, 20 bp, Peptoniphilus indolicus
aaggcgacttactggtcaca

SEQ ID NO: 44046 - DNA, 20 bp, Comamonas testosteroni
agagcggctgatggcagatt

SEQ ID NO: 44047 - DNA, 20 bp, Proteus vulgaris
acttgggaattgcatctgaa

SEQ ID NO: 44048 - DNA, 20 bp, Streptococcus dysgalactiae
caactgcatcactatgagat

SEQ ID NO: 44049 - DNA, 20 bp, Actinomyces odontolyticus
tggcatttagttggtcgtgt

SEQ ID NO: 44050 - DNA, 20 bp, Facklamia ignava
tcagtgctggcgcaaacgca

SEQ ID NO: 44051 - DNA, 20 bp, Bacteroides vulgatus
acctctctcagttcggactg

SEQ ID NO: 44052 - DNA, 20 bp, Turicella otitidis
ggtcttttcacgactttcgt

SEQ ID NO: 44053 - DNA, 20 bp, Serratia proteamaculans
ggaagggtagtgtgttaata

SEQ ID NO: 44054 - DNA, 20 bp, Cardiobacterium hominis
gggaatctgccttttgctgg

SEQ ID NO: 44055 - DNA, 20 bp, Facklamia hominis
tgaagcccttcggggcaaga

SEQ ID NO: 44056 - DNA, 20 bp, Actinomyces naeslundii
gccttttccgggtcttccgc

SEQ ID NO: 44057 - DNA, 20 bp, Brochothrix campestris
gtaacctgcctcacagctgg

SEQ ID NO: 44058 - DNA, 20 bp, Lactococcus garvieae
gatcccgcgttgtattagct

SEQ ID NO: 44059 - DNA, 20 bp, Bacteroides vulgatus
tgaggcaggcggaattcgtg

SEQ ID NO: 44060 - DNA, 20 bp, Bacteroides uniformis
aatgatgtggagacatgtca

SEQ ID NO: 44061 - DNA, 20 bp, Pseudoramibacter alactolyticus
aaatcccttaaaacagatcc

SEQ ID NO: 44062 - DNA, 20 bp, Peptostreptococcus anaerobius
atgataatatatatttacgg

SEQ ID NO: 44063 - DNA, 20 bp, Chromobacterium violaceum
aggaaatcccgctggttaat

SEQ ID NO: 44064 - DNA, 20 bp, Anaerococcus tetradius
cttttaaaactgttaggctt

SEQ ID NO: 44065 - DNA, 20 bp, Gemella bergeri
ctggtgcttgcactagaaat

SEQ ID NO: 44066 - DNA, 20 bp, Rothia mucilaginosa
ctggaccgcatcagagatgg

SEQ ID NO: 44067 - DNA, 20 bp, Eikenella corrodens
gcggccgataactgattagc

SEQ ID NO: 44068 - DNA, 20 bp, Clostridium tetani
aggcggatgcttaagtgaga

SEQ ID NO: 44069 - DNA, 20 bp, Leuconostoc pseudomesenteroides
acagctagaatagggaatga

SEQ ID NO: 44070 - DNA, 20 bp, Vibrio hollisae
ctcacgctattcgagcggcc

SEQ ID NO: 44071 - DNA, 20 bp, Neisseria meningitidis
tggtaagcggactccttgcg

SEQ ID NO: 44072 - DNA, 20 bp, Bacillus firmus
gatggcatctcgctatcact

SEQ ID NO: 44073 - DNA, 20 bp, Alicyclobacillus acidocaldarius
gtgagtccccgcctcaacgc

SEQ ID NO: 44074 - DNA, 20 bp, Moraxella osloensis
tagaatatgtgagagggaag

SEQ ID NO: 44075 - DNA, 20 bp, Weeksella virosa
atttagttttgaaagattta

SEQ ID NO: 44076 - DNA, 20 bp, Clostridium sordellii
ggtctttcaagccagaagtg

SEQ ID NO: 44077 - DNA, 20 bp, Leuconostoc lactis
caggtagtgacggtatccaa

SEQ ID NO: 44078 - DNA, 20 bp, Moraxella lacunata
aatacctacaagccctgacg

SEQ ID NO: 44079 - DNA, 20 bp, Clostridium sordellii
tcaagccagaagtgaaaggc

SEQ ID NO: 44080 - DNA, 20 bp, Bacteroides uniformis
agaactattaaagaatttcg

SEQ ID NO: 44081 - DNA, 20 bp, Actinomyces meyeri
caagccgcaactgtgggttg

SEQ ID NO: 44082 - DNA, 20 bp, Burkholderia multivorans
ctctaatacagtcgggggat

SEQ ID NO: 44083 - DNA, 20 bp, Pseudoramibacter alactolyticus
agagaaccgcaaggactcag

SEQ ID NO: 44084 - DNA, 20 bp, Methylobacterium mesophilicum
tccacttcggtggcgcgcac

SEQ ID NO: 44085 - DNA, 20 bp, Corynebacterium group F
cggtacagcgcgtttgctac

SEQ ID NO: 44086 - DNA, 20 bp, Neisseria lactamica
acccgggaattgcgttctga

SEQ ID NO: 44087 - DNA, 20 bp, Anaerobiospirillum succiniciproducens
gtggaacccacaaagcgtcc

SEQ ID NO: 44088 - DNA, 20 bp, Weeksella virosa
cattagttgccagcgtttaa

SEQ ID NO: 44089 - DNA, 20 bp, Oligella ureolytica
cttaggctaataccttaaga

SEQ ID NO: 44090 - DNA, 20 bp, Prevotella denticola
acactacatctctgcagcaa

SEQ ID NO: 44091 - DNA, 20 bp, Leptotrichia buccalis
tggacggaactgcacgagta

SEQ ID NO: 44092 - DNA, 20 bp, Bacillus alcalophilus
caaagggagcttgctcccag

SEQ ID NO: 44093 - DNA, 20 bp, Bacillus flexus
gtcgagcgaactgattagaa

SEQ ID NO: 44094 - DNA, 20 bp, Neisseria meningitidis
gcaggggactttcgggcctt

SEQ ID NO: 44095 - DNA, 20 bp, Actinomyces odontolyticus
ggtcgtgtgcaggtggtgca

SEQ ID NO: 44096 - DNA, 20 bp, Brevibacillus laterosporus
ctacttcgcgagaagatgct

SEQ ID NO: 44097 - DNA, 20 bp, Bacteroides fragilis
tgtggaaacatgtcagtgag

SEQ ID NO: 44098 - DNA, 20 bp, Moraxella lacunata
tgggtgactagagtaggtga

SEQ ID NO: 44099 - DNA, 20 bp, Delftia acidovorans
cgaaaaagcttctcctaata

SEQ ID NO: 44100 - DNA, 20 bp, Listeria welshimeri
ggctttgaaagatggtttcg

SEQ ID NO: 44101 - DNA, 20 bp, Abiotrophia defectiva
agtaactgttatgcgtgtga

SEQ ID NO: 44102 - DNA, 20 bp, Brevibacillus choshinensis
cttgctcttcggcggttagc

SEQ ID NO: 44103 - DNA, 20 bp, Peptostreptococcus anaerobius
tgacatcccttagaccggtg

SEQ ID NO: 44104 - DNA, 20 bp, Methylobacterium mesophilicum
tcctttgacatggcgtgtta

SEQ ID NO: 44105 - DNA, 20 bp, Alicyclobacillus acidocaldarius
tcgcgggcgtatccggcatt

SEQ ID NO: 44106 - DNA, 20 bp, Vibrio cholerae
cctgggcatatccggtagcg

SEQ ID NO: 44107 - DNA, 20 bp, Anaerobiospirillum succiniciproducens
ggaatcttttagagataaga

SEQ ID NO: 44108 - DNA, 20 bp, Actinomyces radingae
caaggcttgacatgcgccct

SEQ ID NO: 44109 - DNA, 20 bp, Acinetobacter haemolyticus
gtgtagcttgctacattacc

SEQ ID NO: 44110 - DNA, 20 bp, Actinomyces turicensis
cgctcatggtcaagccgcag

SEQ ID NO: 44111 - DNA, 20 bp, Veillonella atypica
tgacattgatggacagaacc

SEQ ID NO: 44112 - DNA, 20 bp, Lactococcus lactis
tgagcgggggacaacatttg

SEQ ID NO: 44113 - DNA, 20 bp, Staphylococcus aureus
atggttcaaaagtgaaagac

SEQ ID NO: 44114 - DNA, 20 bp, Bacteroides vulgatus
gtacagagggccgctaccac

SEQ ID NO: 44115 - DNA, 20 bp, Weissella paramesenteroides
accgcatggttgttggttga

SEQ ID NO: 44116 - DNA, 20 bp, Acinetobacter genospecies 3
ggtagcttgctactgatctt

SEQ ID NO: 44117 - DNA, 20 bp, Leuconostoc argentinum
ctggttaacttgagtgttgt

SEQ ID NO: 44118 - DNA, 20 bp, Cardiobacterium hominis
agtatgaaagaggaaagcgg

SEQ ID NO: 44119 - DNA, 20 bp, Prevotella melaninogenica
ggaaggatttagagataatg

SEQ ID NO: 44120 - DNA, 20 bp, Peptostreptococcus anaerobius
agaccggtgtttaatcacac

SEQ ID NO: 44121 - DNA, 20 bp, Veillonella atypica
tgacattgatggacagaact

SEQ ID NO: 44122 - DNA, 20 bp, Gemella bergeri
ataagatggctttgcggagc

SEQ ID NO: 44123 - DNA, 20 bp, Corynebacterium auris
gtggagctaatcgctagaaa

SEQ ID NO: 44124 - DNA, 20 bp, Campylobacter rectus
tactagttgttgcttcgcta

SEQ ID NO: 44125 - DNA, 20 bp, Anaerococcus tetradius
cgtgatttagaaggccttcg

SEQ ID NO: 44126 - DNA, 20 bp, Clostridium glycolicum
ttgggggcgcccgaagccac

SEQ ID NO: 44127 - DNA, 20 bp, Morganella morganii
ttaacccgggaattgcatct

SEQ ID NO: 44128 - DNA, 20 bp, Streptococcus constellatus
atttactgcatggtagatgt

SEQ ID NO: 44129 - DNA, 20 bp, Acinetobacter johnsonii
cttgctacctgacctagcgg

SEQ ID NO: 44130 - DNA, 20 bp, Haemophilus influenzae
atcaaattgacgttaaatac

SEQ ID NO: 44131 - DNA, 20 bp, Facklamia ignava
agcgagaagcgacgtcgcga

SEQ ID NO: 44132 - DNA, 20 bp, Bacillus psychrosaccharolyticus
ctctcgcatgagagaagatg

SEQ ID NO: 44133 - DNA, 20 bp, Clostridium glycolicum
atcaaagctccggcggtatg

SEQ ID NO: 44134 - DNA, 20 bp, Anaerococcus prevotii
ccagggcttgacatactgag

SEQ ID NO: 44135 - DNA, 20 bp, Paenibacillus popilliae
ccagggaagaacgccttgta

SEQ ID NO: 44136 - DNA, 20 bp, Campylobacter sputorum
ctatgggatgaggctatatt

SEQ ID NO: 44137 - DNA, 20 bp, Prevotella bivia
agattgcagcgcgaactgtc

SEQ ID NO: 44138 - DNA, 20 bp, Leptotrichia buccalis
gccctgcagacagggataac

SEQ ID NO: 44139 - DNA, 20 bp, Veillonella sp.
gatcgcgagatggagcaaac

SEQ ID NO: 44140 - DNA, 20 bp, Alicyclobacillus acidocaldarius
ctcggtaccgtctcgcatgg

SEQ ID NO: 44141 - DNA, 20 bp, Clostridium innocuum
agaagagggcgatggaattc

SEQ ID NO: 44142 - DNA, 20 bp, Tissierella praeacuta
agaagatttcttcggaatga

SEQ ID NO: 44143 - DNA, 20 bp, Listeria innocua
aataccgaatgatagagtgt

SEQ ID NO: 44144 - DNA, 20 bp, Clostridium paraputrificum
cttcgcatgaagtagcaatt

SEQ ID NO: 44145 - DNA, 20 bp, Enterobacter sakazakii
tcagcttgagtctcgtagag

SEQ ID NO: 44146 - DNA, 20 bp, Prevotella denticola
tcaacgtctgaattgcagcg

SEQ ID NO: 44147 - DNA, 20 bp, Peptoniphilus indolicus
caaagatggactcgcgtctg

SEQ ID NO: 44148 - DNA, 20 bp, Brevibacillus choshinensis
gatccgaaaagaaaaggcgg

SEQ ID NO: 44149 - DNA, 20 bp, Paenibacillus amylolyticus
agataatgaaagacggagca

SEQ ID NO: 44150 - DNA, 20 bp, Chromobacterium violaceum
gttgtgcaagtctgatgtga

SEQ ID NO: 44151 - DNA, 20 bp, Corynebacterium group F
atttttgtgacggtacctgg

SEQ ID NO: 44152 - DNA, 20 bp, Tissierella praeacuta
taaccatttggaggcagctg

SEQ ID NO: 44153 - DNA, 20 bp, Nocardia asteroides
cggtaactgacctagcggcg

SEQ ID NO: 44154 - DNA, 20 bp, Leptotrichia buccalis
caaccgcaagcctgccctgg

SEQ ID NO: 44155 - DNA, 20 bp, Streptococcus constellatus
gcaagtagaacgcacaggat

SEQ ID NO: 44156 - DNA, 20 bp, Peptostreptococcus anaerobius
tatttacggcatcgtagata

SEQ ID NO: 44157 - DNA, 20 bp, Aerococcus christensenii
ccgataagcgggggacaaca

SEQ ID NO: 44158 - DNA, 20 bp, Paenibacillus larvae
caggggagtaactgcccctg

SEQ ID NO: 44159 - DNA, 20 bp, Clostridium clostridiiforme
gcctcacactgggggataac

SEQ ID NO: 44160 - DNA, 20 bp, Actinomyces bovis
gaaattcagtgctgtagtta

SEQ ID NO: 44161 - DNA, 20 bp, Corynebacterium auris
taggtgtgagcctcttccac

SEQ ID NO: 44162 - DNA, 20 bp, Enterococcus raffinosus
ttctatttgaaaggcgcttt

SEQ ID NO: 44163 - DNA, 20 bp, Streptococcus porcinus
acttaaaaggggcaactgct

SEQ ID NO: 44164 - DNA, 20 bp, Bacillus fusiformis
atcccgttgaccactgtaga

SEQ ID NO: 44165 - DNA, 20 bp, Bacillus megaterium
cttcatgggagatgattgaa

SEQ ID NO: 44166 - DNA, 20 bp, Anaerococcus tetradius
ggagggaattagagatagtt

SEQ ID NO: 44167 - DNA, 20 bp, Methylobacterium mesophilicum
tatggggagagattcccagt

SEQ ID NO: 44168 - DNA, 20 bp, Paenibacillus pabuli
ccctcaagtttgggacaact

SEQ ID NO: 44169 - DNA, 20 bp, Peptostreptococcus anaerobius
cacccgaagccgattatcca

SEQ ID NO: 44170 - DNA, 20 bp, Leuconostoc lactis
ctgatcaggtagtgacggta

SEQ ID NO: 44171 - DNA, 20 bp, Fusobacterium mortiferum
gcatgaaattcatatgaaag

SEQ ID NO: 44172 - DNA, 20 bp, Dermacoccus nishinomiyaensis
tgacatacaccggaatcatg

SEQ ID NO: 44173 - DNA, 20 bp, Sporosarcina pasteurii
catcccgctgaccggtatag

SEQ ID NO: 44174 - DNA, 20 bp, Facklamia hominis
agaagaacgaccgctagagt

SEQ ID NO: 44175 - DNA, 20 bp, Bacteroides forsythus
gcgaccggatgccaatctcc

SEQ ID NO: 44176 - DNA, 20 bp, Streptococcus bovis
tgctagagtagaaggagttg

SEQ ID NO: 44177 - DNA, 20 bp, Facklamia ignava
tacgggacaagaagacaggt

SEQ ID NO: 44178 - DNA, 20 bp, Streptococcus pyogenes
agaacgctgagaactggtgc

SEQ ID NO: 44179 - DNA, 20 bp, Lactococcus lactis
cataaaaactttaaacacaa

SEQ ID NO: 44180 - DNA, 20 bp, Alcaligenes faecalis
gggccgttaggccttagtag

SEQ ID NO: 44181 - DNA, 20 bp, Weissella paramesenteroides
ttggttgaaagatggttctg

SEQ ID NO: 44182 - DNA, 20 bp, Bacillus sp
aatggttttgtgggatttgc

SEQ ID NO: 44183 - DNA, 20 bp, Pseudoramibacter alactolyticus
aaaactccggtgccatagga

SEQ ID NO: 44184 - DNA, 20 bp, Fusobacterium nucleatum
ataattatgaaagctataag

SEQ ID NO: 44185 - DNA, 20 bp, Anaerococcus prevotii
actgaggaccggtatagaga

SEQ ID NO: 44186 - DNA, 20 bp, Bacteroides forsythus
aattgccgttgaaactggta

SEQ ID NO: 44187 - DNA, 20 bp, Prevotella loescheii
gcggtgaaggatggggatgc

SEQ ID NO: 44188 - DNA, 20 bp, Corynebacterium pilosum
gagatagtctttcccttgtg

SEQ ID NO: 44189 - DNA, 20 bp, Prevotella oris
cgcgaactggtccacttgag

SEQ ID NO: 44190 - DNA, 20 bp, Bacillus schlegellii
ccctgttgtcggggaagaag

SEQ ID NO: 44191 - DNA, 20 bp, Prevotella corporis
gaaaggcagactaatacctt

SEQ ID NO: 44192 - DNA, 20 bp, Facklamia ignava
tatcagagaagaatagcctg

SEQ ID NO: 44193 - DNA, 20 bp, Porphyromonas endodontalis
ttgattacagatgggcatgc

SEQ ID NO: 44194 - DNA, 20 bp, Prevotella loescheii
ccccgatggcgaccggcgca

SEQ ID NO: 44195 - DNA, 20 bp, Eggerthella lenta
cctgctgggccgcaactgac

SEQ ID NO: 44196 - DNA, 20 bp, Tissierella praeacuta
aagcgtaaagcggtaaaaga

SEQ ID NO: 44197 - DNA, 20 bp, Actinomyces odontolyticus
tggtggcatttagttggtcg

SEQ ID NO: 44198 - DNA, 20 bp, Streptococcus sobrinus
atgctttggaaactgttaga

SEQ ID NO: 44199 - DNA, 20 bp, Streptococcus thermophilus
aattgctccactacaagatg

SEQ ID NO: 44200 - DNA, 20 bp, Neisseria polysaccharea
gaccttgcgctattcgagcg

SEQ ID NO: 44201 - DNA, 20 bp, Tissierella praeacuta
gtcctagagatagggcttta

SEQ ID NO: 44202 - DNA, 20 bp, Anaerococcus prevotii
ccgggattaataccaaatga

SEQ ID NO: 44203 - DNA, 20 bp, Peptostreptococcus anaerobius
tacatgataatatatattta

SEQ ID NO: 44204 - DNA, 20 bp, Bacteroides uniformis
ccatcaggttatgctggggg

SEQ ID NO: 44205 - DNA, 20 bp, Chryseobacterium meningosepticum
tacttacgtgtaagtagctg

SEQ ID NO: 44206 - DNA, 20 bp, Alicyclobacillus acidocaldarius
cctctctcagcggcccaatt

SEQ ID NO: 44207 - DNA, 20 bp, Corynebacterium afermentans
cgtcagttcggcccagagat

SEQ ID NO: 44208 - DNA, 20 bp, Alcaligenes faecalis
atttggccgtgctcgcaaga

SEQ ID NO: 44209 - DNA, 20 bp, Rothia mucilaginosa
accggatacgaccaatctcc

SEQ ID NO: 44210 - DNA, 20 bp, Actinomyces bovis
tggatactaagtgttggaga

SEQ ID NO: 44211 - DNA, 20 bp, Actinomyces naeslundii
tttgtgggtgggttgacggt

SEQ ID NO: 44212 - DNA, 20 bp, Cardiobacterium hominis
actgggcgactagagtatga

SEQ ID NO: 44213 - DNA, 20 bp, Pediococcus pentosaceus
ttgttaaagaagaacgtggg

SEQ ID NO: 44214 - DNA, 20 bp, Bacteroides fragilis
ttcattattaaaggattccg

SEQ ID NO: 44215 - DNA, 20 bp, Actinomyces bovis
agggaatgcttcttatatga

SEQ ID NO: 44216 - DNA, 20 bp, Alcaligenes faecalis
tggaaagccgaagagatttg

SEQ ID NO: 44217 - DNA, 20 bp, Campylobacter rectus
ggaaagaattatgacggtac

SEQ ID NO: 44218 - DNA, 20 bp, Enterococcus cecorum
tagcgagactgccgcagaca

SEQ ID NO: 44219 - DNA, 20 bp, Pseudomonas fluorescens
atacgtgagtattttgacgt

SEQ ID NO: 44220 - DNA, 20 bp, Bacillus pumilus
atggttcaaggatgaaagac

SEQ ID NO: 44221 - DNA, 20 bp, Moraxella bovis
ccttcgggagcttggataca

SEQ ID NO: 44222 - DNA, 20 bp, Actinomyces bovis
caagtttatggttaaagttc

SEQ ID NO: 44223 - DNA, 20 bp, Tissierella praeacuta
cgagcgaagtttttaaagaa

SEQ ID NO: 44224 - DNA, 20 bp, Eikenella corrodens
gaagtgctaataccactttt

SEQ ID NO: 44225 - DNA, 20 bp, Campylobacter sputorum
ttctttgggaagaataatga

SEQ ID NO: 44226 - DNA, 20 bp, Proteus vulgaris
ttaatacctttgtcaattga

SEQ ID NO: 44227 - DNA, 20 bp, Streptococcus hyovaginalis
ttactctgtgacggtagctt

SEQ ID NO: 44228 - DNA, 20 bp, Bacteroides distasonis
ggcacagcgaaagcgttaag

SEQ ID NO: 44229 - DNA, 20 bp, Clostridium tetani
aaccaaaggagtaatctgct

SEQ ID NO: 44230 - DNA, 20 bp, Fusobacterium nucleatum
atcttagaattatgaaagct

SEQ ID NO: 44231 - DNA, 20 bp, Streptococcus thermophilus
gatcctttccgggattcagt

SEQ ID NO: 44232 - DNA, 20 bp, Facklamia hominis
actgttagcggagtgacggt

SEQ ID NO: 44233 - DNA, 20 bp, Campylobacter curvus
actgctaataccttatactc

SEQ ID NO: 44234 - DNA, 20 bp, Bacteroides distasonis
tggcgacagggagcgaatcc

SEQ ID NO: 44235 - DNA, 20 bp, Weissella paramesenteroides
gttgttggttgaaagatggt

SEQ ID NO: 44236 - DNA, 20 bp, Bacteroides thetaiotaomicron
cgtaggtggacagttaagtc

SEQ ID NO: 44237 - DNA, 20 bp, Leuconostoc argentinum
agtcgaacgcgcagcgaaag

SEQ ID NO: 44238 - DNA, 20 bp, Peptostreptococcus anaerobius
tcgtaaagttctgttgcagg

SEQ ID NO: 44239 - DNA, 20 bp, Anaerococcus prevotii
agtcgagcgatgaaatcttg

SEQ ID NO: 44240 - DNA, 20 bp, Rhodococcus equi
ttttcccttgtggtttgtat

SEQ ID NO: 44241 - DNA, 20 bp, Moraxella lacunata
gcttgtggttaatacctaca

SEQ ID NO: 44242 - DNA, 20 bp, Bacillus lentus
aaaaagcaagcttcttattg

SEQ ID NO: 44243 - DNA, 20 bp, Streptococcus constellatus
caggacgacgctggcggcgt

SEQ ID NO: 44244 - DNA, 20 bp, Tissierella praeacuta
agttgctaacagataagctg

SEQ ID NO: 44245 - DNA, 20 bp, Streptococcus iniae
aagcttcactatgagatgga

SEQ ID NO: 44246 - DNA, 20 bp, Corynebacterium mycetoides
caacgcgtgtgcgacactgt

SEQ ID NO: 44247 - DNA, 20 bp, Cardiobacterium hominis
acgatgtcaactaggcgtcg

SEQ ID NO: 44248 - DNA, 20 bp, Anaerococcus tetradius
actatagtaagcttttaaaa

SEQ ID NO: 44249 - DNA, 20 bp, Staphylococcus caprae
aatggacaatacaaagggtg

SEQ ID NO: 44250 - DNA, 20 bp, Clostridium cadaveris
gagcaccttcgggtgtgaac

SEQ ID NO: 44251 - DNA, 20 bp, Fusobacterium varium
acatcccaagaagttaacag

SEQ ID NO: 44252 - DNA, 20 bp, Bacillus fusiformis
gagaaggagcttgctccttc

SEQ ID NO: 44253 - DNA, 20 bp, Methylobacterium mesophilicum
ttggggaaaggcttgctgcc

SEQ ID NO: 44254 - DNA, 20 bp, Tetragenococcus halophilus
gtcggtgcggcaacccttag

SEQ ID NO: 44255 - DNA, 20 bp, Comamonas testosteroni
gaacgaaaagcctggggcta

SEQ ID NO: 44256 - DNA, 20 bp, Corynebacterium glucuronolyticum
aaactgggtctaatacccta

SEQ ID NO: 44257 - DNA, 20 bp, Photobacterium damselae
tagttaacacctgcattatt

SEQ ID NO: 44258 - DNA, 20 bp, Facklamia languida
aagggcaagcgaatctctta

SEQ ID NO: 44259 - DNA, 20 bp, Listeria monocytogenes
gcgcatgccacgcttttgaa

SEQ ID NO: 44260 - DNA, 20 bp, Anaerococcus prevotii
tcggaataattcggtgccgc

SEQ ID NO: 44261 - DNA, 20 bp, Bacteroides merdae
caaaccatgtctcagttcgg

SEQ ID NO: 44262 - DNA, 20 bp, Bacteroides thetaiotaomicron
cagtttgcttgcaaactgga

SEQ ID NO: 44263 - DNA, 20 bp, Prevotella corporis
caagggataacctgccgaaa

SEQ ID NO: 44264 - DNA, 20 bp, Bacteroides ovatus
tctatgggtcgtaaacttct

SEQ ID NO: 44265 - DNA, 20 bp, Leptotrichia buccalis
ctaaggtgtggatagtgatt

SEQ ID NO: 44266 - DNA, 20 bp, Streptococcus parasanguinis
atgttgacttgaaaggtgca

SEQ ID NO: 44267 - DNA, 20 bp, Bacillus pumilus
ccaatcccataaatctgttc

SEQ ID NO: 44268 - DNA, 20 bp, Streptococcus sobrinus
ggaagaacgtgtgtaagagt

SEQ ID NO: 44269 - DNA, 20 bp, Shigella dysenteriae
acggtaacagaaagcagctt

SEQ ID NO: 44270 - DNA, 20 bp, Prevotella intermedia
aggatacagagatgttgact

SEQ ID NO: 44271 - DNA, 20 bp, Moraxella osloensis
agaggctaatggttaatacc

SEQ ID NO: 44272 - DNA, 20 bp, Enterococcus raffinosus
gcatggtttctatttgaaag

SEQ ID NO: 44273 - DNA, 20 bp, Neisseria meningitidis
atcagccgctgatattagca

SEQ ID NO: 44274 - DNA, 20 bp, Gemella haemolysans
agtcgagcgaagtttttctg

SEQ ID NO: 44275 - DNA, 20 bp, Corynebacterium xerosis
agcttgctgcgggtactcga

SEQ ID NO: 44276 - DNA, 20 bp, Finegoldia magna
agacatccatacaggtggtg

SEQ ID NO: 44277 - DNA, 20 bp, Yersinia kristensenii
tcagtgttaatagcactgag

SEQ ID NO: 44278 - DNA, 20 bp, Oligella ureolytica
cccgcgtgtgggacgaaggc

SEQ ID NO: 44279 - DNA, 20 bp, Moraxella osloensis
cccattagattagacgttac

SEQ ID NO: 44280 - DNA, 20 bp, Granulicatella elegans
gtgcttgcactggtcaatct

SEQ ID NO: 44281 - DNA, 20 bp, Gemella haemolysans
gaggacacaagagattgtgt

SEQ ID NO: 44282 - DNA, 20 bp, Tissierella praeacuta
aaggtagggtcaatgactgg

SEQ ID NO: 44283 - DNA, 20 bp, Streptococcus canis
ggtgcttgcactagtctaag

SEQ ID NO: 44284 - DNA, 20 bp, Anaerobiospirillum succiniciproducens
accagaggcgaaggcggtct

SEQ ID NO: 44285 - DNA, 20 bp, Kingella denitrificans
ttttgttgacggtacctaaa

SEQ ID NO: 44286 - DNA, 20 bp, Enterococcus dispar
tgcgtcacttgaggatggac

SEQ ID NO: 44287 - DNA, 20 bp, Facklamia ignava
cgagaagcgacgtcgcgagg

SEQ ID NO: 44288 - DNA, 20 bp, Yersinia ruckeri
cactgaacattgacgttact

SEQ ID NO: 44289 - DNA, 20 bp, Actinomyces bovis
agagggaatgcttcttatat

SEQ ID NO: 44290 - DNA, 20 bp, Pediococcus inopinatus
atggttttcttttaaaagat

SEQ ID NO: 44291 - DNA, 20 bp, Acinetobacter haemolyticus
aggcggctgattaagtcgga

SEQ ID NO: 44292 - DNA, 20 bp, Rothia mucilaginosa
gaagaagagagattgacggt

SEQ ID NO: 44293 - DNA, 20 bp, Peptostreptococcus anaerobius
tctgttgcaggggaagataa

SEQ ID NO: 44294 - DNA, 20 bp, Eikenella corrodens
ctttttgctgacggtaccta

SEQ ID NO: 44295 - DNA, 20 bp, Lactococcus raffinolactis
acatactcgtgctattccta

SEQ ID NO: 44296 - DNA, 20 bp, Haemophilus segnis
tagactaggtgattgacgtt

SEQ ID NO: 44297 - DNA, 20 bp, Corynebacterium glucuronolyticum
gtaacacgtaagtgatctgc

SEQ ID NO: 44298 - DNA, 20 bp, Bacteroides thetaiotaomicron
ccgcatggtcttgttattaa

SEQ ID NO: 44299 - DNA, 20 bp, Prevotella denticola
ggagcgtaggctggagatta

SEQ ID NO: 44300 - DNA, 20 bp, Actinomyces meyeri
ggtcaagccgcaactgtggg

SEQ ID NO: 44301 - DNA, 20 bp, Alicyclobacillus acidocaldarius
ccatgccgctctccccgagc

SEQ ID NO: 44302 - DNA, 20 bp, Neisseria polysaccharea
gttgctaatatcagcggctg

SEQ ID NO: 44303 - DNA, 20 bp, Pediococcus inopinatus
caagtcggacgcactttcgt

SEQ ID NO: 44304 - DNA, 20 bp, Clostridium ramosum
attattgggcgtaaagaggg

SEQ ID NO: 44305 - DNA, 20 bp, Acinetobacter lwoffii
gaggaggaggctaccgagat

SEQ ID NO: 44306 - DNA, 20 bp, Veillonella atypica
tggaagcttgcttctatcaa

SEQ ID NO: 44307 - DNA, 20 bp, Bacteroides thetaiotaomicron
attaatacccgatggtataa

SEQ ID NO: 44308 - DNA, 20 bp, Tissierella praeacuta
agataagctgagcactctag

SEQ ID NO: 44309 - DNA, 20 bp, Bacillus sp
ctccctatctctagggccgt

SEQ ID NO: 44310 - DNA, 20 bp, Brevibacillus borstelensis
gtcgagcgagtcccttcggg

SEQ ID NO: 44311 - DNA, 20 bp, Bacteroides fragilis
ccgtatgctaatcccaaaat

SEQ ID NO: 44312 - DNA, 20 bp, Campylobacter sputorum
ttcgatagtgaaagatggct

SEQ ID NO: 44313 - DNA, 20 bp, Prevotella melaninogenica
gacgcccttcggggtctctg

SEQ ID NO: 44314 - DNA, 20 bp, Campylobacter lari
gttgttgctgtgctagtcac

SEQ ID NO: 44315 - DNA, 20 bp, Tissierella praeacuta
tttaattatcttagcggcgg

SEQ ID NO: 44316 - DNA, 20 bp, Actinomyces bovis
atcaagtttatggttaaagt

SEQ ID NO: 44317 - DNA, 20 bp, Citrobacter koseri
actgtgccttcgggagccgt

SEQ ID NO: 44318 - DNA, 20 bp, Eggerthella lenta
gaggagcgtccgcaggtggt

SEQ ID NO: 44319 - DNA, 20 bp, Neisseria subflava
aaaggctgttgctaacatca

SEQ ID NO: 44320 - DNA, 20 bp, Chryseobacterium meningosepticum
tgtaagtagctgaaggtacc

SEQ ID NO: 44321 - DNA, 20 bp, Corynebacterium afermentans
gctactgaccatgcggtcgc

SEQ ID NO: 44322 - DNA, 20 bp, Pediococcus pentosaceus
cttttaaaagatggctctgc

SEQ ID NO: 44323 - DNA, 20 bp, Gemella bergeri
aacagacggtacctaaccag

SEQ ID NO: 44324 - DNA, 20 bp, Moraxella osloensis
gttaatacccattagattag

SEQ ID NO: 44325 - DNA, 20 bp, Leuconostoc argentinum
cctttcaagcgagtggcgaa

SEQ ID NO: 44326 - DNA, 20 bp, Leuconostoc pseudomesenteroides
gctttggcgtcacctagaga

SEQ ID NO: 44327 - DNA, 20 bp, Bacteroides fragilis
atcaccgctgtgaaggtgct

SEQ ID NO: 44328 - DNA, 20 bp, Aerococcus christensenii
tcgatggccttgcggtgcat

SEQ ID NO: 44329 - DNA, 20 bp, Gemella morbillorum
tgttagggaagaatggatat

SEQ ID NO: 44330 - DNA, 20 bp, Finegoldia magna
tatcgtaaagttctgtccta

SEQ ID NO: 44331 - DNA, 20 bp, Arcanobacterium bernardiae
gcaggttactgggccaccac

SEQ ID NO: 44332 - DNA, 20 bp, Listeria monocytogenes
tggcgcatgccacgcttttg

SEQ ID NO: 44333 - DNA, 20 bp, Bacillus schlegellii
tgaagtcgtacaaggtaccg

SEQ ID NO: 44334 - DNA, 20 bp, Alicyclobacillus acidocaldarius
gagcaacagagctttacaac

SEQ ID NO: 44335 - DNA, 20 bp, Moraxella lacunata
ggtgactagagtaggtgaga

SEQ ID NO: 44336 - DNA, 20 bp, Bordetella bronchiseptica
acgggctaatatcctgtgca

SEQ ID NO: 44337 - DNA, 20 bp, Tetragenococcus halophilus
gctttttttcacctgaaaga

SEQ ID NO: 44338 - DNA, 20 bp, Tissierella praeacuta
agcgaagtttttaaagaaga

SEQ ID NO: 44339 - DNA, 20 bp, Listeria monocytogenes
aagtgtggcgcatgccacgc

SEQ ID NO: 44340 - DNA, 20 bp, Bacteroides fragilis
taaagtgcagtatgtatact

SEQ ID NO: 44341 - DNA, 20 bp, Actinomyces bovis
aggtcttgacataccgcgca

SEQ ID NO: 44342 - DNA, 20 bp, Corynebacterium propinquum
ttggggtttctgtgccgtag

SEQ ID NO: 44343 - DNA, 20 bp, Corynebacterium amycolatum
ataggaccatggtgtggatg

SEQ ID NO: 44344 - DNA, 20 bp, Corynebacterium macginleyi
aagccggtggcctaaacgtg

SEQ ID NO: 44345 - DNA, 20 bp, Neisseria meningitidis
cgtcatcagccgctgatatt

SEQ ID NO: 44346 - DNA, 20 bp, Fusobacterium nucleatum
gcctcacaggtagggacaac

SEQ ID NO: 44347 - DNA, 20 bp, Veillonella atypica
gagatggttcctcttcttcg

SEQ ID NO: 44348 - DNA, 20 bp, Anaerococcus prevotii
taataccaaatgaaatcaca

SEQ ID NO: 44349 - DNA, 20 bp, Bacillus circulans
aggaaaagctgaaagacggt

SEQ ID NO: 44350 - DNA, 20 bp, Empedobacter brevis
acgatgatctttagggggcc

SEQ ID NO: 44351 - DNA, 20 bp, Clostridium glycolicum
gccaagtcgtgaggccgagc

SEQ ID NO: 44352 - DNA, 20 bp, Leptotrichia buccalis
ggataacagacggaaacgac

SEQ ID NO: 44353 - DNA, 20 bp, Bacteroides thetaiotaomicron
atgggaataaagttttccac

SEQ ID NO: 44354 - DNA, 20 bp, Rothia mucilaginosa
cggggctggtatacaggtgg

SEQ ID NO: 44355 - DNA, 20 bp, Bacillus coagulans
cttcggacctcacgccaccg

SEQ ID NO: 44356 - DNA, 20 bp, Bacteroides fragilis
tgtatgtattatatgaataa

SEQ ID NO: 44357 - DNA, 20 bp, Bacteroides thetaiotaomicron
ttccattagtttgttggcgg

SEQ ID NO: 44358 - DNA, 20 bp, Corynebacterium afermentans
cagacgtttcctctatatgt

SEQ ID NO: 44359 - DNA, 20 bp, Arcanobacterium bernardiae
cagaacaaggcctttttggt

SEQ ID NO: 44360 - DNA, 20 bp, Bacteroides forsythus
atcgatggttaggggttctg

SEQ ID NO: 44361 - DNA, 20 bp, Anaerococcus prevotii
accggtatagagatataccc

SEQ ID NO: 44362 - DNA, 20 bp, Streptococcus porcinus
tacttaaaaggggcaactgc

SEQ ID NO: 44363 - DNA, 20 bp, Providencia alcalifaciens
aataatctctaaggagcaaa

SEQ ID NO: 44364 - DNA, 20 bp, Bacillus coagulans
tttttcctccgcatggagga

SEQ ID NO: 44365 - DNA, 20 bp, Gemella haemolysans
tgcttgcaccggaaaaactt

SEQ ID NO: 44366 - DNA, 20 bp, Kingella denitrificans
gtcggacggcagcgggggtg

SEQ ID NO: 44367 - DNA, 20 bp, Serratia marcescens
tacgctcatcaattgacgtt

SEQ ID NO: 44368 - DNA, 20 bp, Bacteroides forsythus
tactaggagtttgcgatata

SEQ ID NO: 44369 - DNA, 20 bp, Gemella haemolysans
gttggttttgctaacactat

SEQ ID NO: 44370 - DNA, 20 bp, Chromobacterium violaceum
aacagggtgcttgcaccgct

SEQ ID NO: 44371 - DNA, 20 bp, Virgibacillus pantothenticus
gctaataccggatgatacat

SEQ ID NO: 44372 - DNA, 20 bp, Paenibacillus glucanolyticus
tgtgataatgaaagacggag

SEQ ID NO: 44373 - DNA, 20 bp, Atopobium parvulum
ccgggggctcaacccccgct

SEQ ID NO: 44374 - DNA, 20 bp, Pediococcus pentosaceus
gaacttccgttaattgatta

SEQ ID NO: 44375 - DNA, 20 bp, Tissierella praeacuta
tacaggggacacaggtggtg

SEQ ID NO: 44376 - DNA, 20 bp, Fusobacterium nucleatum
tattatgattttagggcatc

SEQ ID NO: 44377 - DNA, 20 bp, Staphylococcus pulvereri
ggctaatacctgataatatt

SEQ ID NO: 44378 - DNA, 20 bp, Corynebacterium accolens
aggaaccatctttagtgtgg

SEQ ID NO: 44379 - DNA, 20 bp, Micromonas micros
acttgagtgaaggagaggaa

SEQ ID NO: 44380 - DNA, 20 bp, Bacteroides thetaiotaomicron
cgtgtggaattttgtatgta

SEQ ID NO: 44381 - DNA, 20 bp, Salmonella enteritidis
ccacagaagaatccagagat

SEQ ID NO: 44382 - DNA, 20 bp, Pediococcus dextrinicus
gcgtaagctgtcacttttgg

SEQ ID NO: 44383 - DNA, 20 bp, Fusobacterium nucleatum
gcatcttagaattatgaaag

SEQ ID NO: 44384 - DNA, 20 bp, Cardiobacterium hominis
agagtatgaaagaggaaagc

SEQ ID NO: 44385 - DNA, 20 bp, Anaerococcus prevotii
ggtatagagatataccctct

SEQ ID NO: 44386 - DNA, 20 bp, Serratia marcescens
tgagcttaatacgttcatca

SEQ ID NO: 44387 - DNA, 20 bp, Clostridium limosum
catgcgtaggcggatactta

SEQ ID NO: 44388 - DNA, 20 bp, Clostridium limosum
ggctcaaccccggtgctgca

SEQ ID NO: 44389 - DNA, 20 bp, Staphylococcus succinus
tgcgcacagttacttacgca

SEQ ID NO: 44390 - DNA, 20 bp, Streptococcus salivarius
atttatttgaaaggggcaaa

SEQ ID NO: 44391 - DNA, 20 bp, Prevotella oris
ctgcagcgcgaactggtcca

SEQ ID NO: 44392 - DNA, 20 bp, Streptococcus equinus
aagcaattgcttcactagta

SEQ ID NO: 44393 - DNA, 20 bp, Weeksella virosa
ggcaggttactaagtctata

SEQ ID NO: 44394 - DNA, 20 bp, Haemophilus segnis
gtagcgaggaaggcatttag

SEQ ID NO: 44395 - DNA, 20 bp, Aerococcus viridans
ccgcatggaagaagattgaa

SEQ ID NO: 44396 - DNA, 20 bp, Bacteroides ureolyticus
tttagtgacaggtgctgcac

SEQ ID NO: 44397 - DNA, 20 bp, Streptococcus gordonii
atgcaagtagaacgcacagt

SEQ ID NO: 44398 - DNA, 20 bp, Anaerococcus tetradius
aggtgtctggaataatctgg

SEQ ID NO: 44399 - DNA, 20 bp, Corynebacterium jeikeium
cggaaaggccctttgcttgc

SEQ ID NO: 44400 - DNA, 20 bp, Fusobacterium varium
gtagtacagagagctgcaaa

SEQ ID NO: 44401 - DNA, 20 bp, Plesiomonas shigelloides
cgagcggtaacacagaggag

SEQ ID NO: 44402 - DNA, 20 bp, Facklamia ignava
cctgtagagtaactgttata

SEQ ID NO: 44403 - DNA, 20 bp, Nocardia asteroides
agggttgctacctcgcgaga

SEQ ID NO: 44404 - DNA, 20 bp, Ralstonia paucula
aaagaaattgctctggctaa

SEQ ID NO: 44405 - DNA, 20 bp, Clostridium clostridiiforme
gccgaaggcggggcaggtaa

SEQ ID NO: 44406 - DNA, 20 bp, Vibrio cholerae
aggcactccagcgtctccgc

SEQ ID NO: 44407 - DNA, 20 bp, Listeria innocua
gctaataccgaatgatagag

SEQ ID NO: 44408 - DNA, 20 bp, Anaerococcus prevotii
tcaaaaagtctttcccagtt

SEQ ID NO: 44409 - DNA, 20 bp, Cardiobacterium hominis
actttgggtgggaactgtaa

SEQ ID NO: 44410 - DNA, 20 bp, Clostridium sordellii
gcttttggaactgtaggact

SEQ ID NO: 44411 - DNA, 20 bp, Campylobacter concisus
ggaaaggcccaagcttgctt

SEQ ID NO: 44412 - DNA, 20 bp, Leptotrichia buccalis
tgatgaagatagttcactgg

SEQ ID NO: 44413 - DNA, 20 bp, Prevotella melaninogenica
gcttttgtatggggataaag

SEQ ID NO: 44414 - DNA, 20 bp, Peptoniphilus indolicus
tttcccttcggggacagtat

SEQ ID NO: 44415 - DNA, 20 bp, Veillonella atypica
gctgatctagagtatcggag

SEQ ID NO: 44416 - DNA, 20 bp, Veillonella parvula
cgcgcaggcggatcagtcag

SEQ ID NO: 44417 - DNA, 20 bp, Serratia marcescens
tggtgagcttaatacgctca

SEQ ID NO: 44418 - DNA, 20 bp, Sphingobacterium multivorum
atatgtcttagaactccgat

SEQ ID NO: 44419 - DNA, 20 bp, Bacteroides thetaiotaomicron
ccacgtgtggaattttgtat

SEQ ID NO: 44420 - DNA, 20 bp, Propionibacterium acnes
ctaaccgttgtgggggagcc

SEQ ID NO: 44421 - DNA, 20 bp, Streptococcus hyovaginalis
ttgacatcccagtgaccatc

SEQ ID NO: 44422 - DNA, 20 bp, Haemophilus actinemycetemcomitans
gccaaattgacgttaaatac

SEQ ID NO: 44423 - DNA, 20 bp, Brochothrix campestris
gatgttcaagtgaaagacgg

SEQ ID NO: 44424 - DNA, 20 bp, Helcococcus kunzii
atatcctagagataggatag

SEQ ID NO: 44425 - DNA, 20 bp, Eubacterium moniliforme
tcggggaagttccttcggga

SEQ ID NO: 44426 - DNA, 20 bp, Budvicia aquatica
catgacccgtggcttccgga

SEQ ID NO: 44427 - DNA, 20 bp, Streptococcus infantarius
catgggttaaatgctgttat

SEQ ID NO: 44428 - DNA, 20 bp, Corynebacterium diphtheriae
tgacatatgcaggatcggcg

SEQ ID NO: 44429 - DNA, 20 bp, Chryseobacterium meningosepticum
ctggggataaacctacttac

SEQ ID NO: 44430 - DNA, 20 bp, Eikenella corrodens
ggaagaaaagggaagtgcta

SEQ ID NO: 44431 - DNA, 20 bp, Prevotella oris
gtggattaagcgtgttgtga

SEQ ID NO: 44432 - DNA, 20 bp, Atopobium parvulum
aaggagcctaaacaggtggt

SEQ ID NO: 44433 - DNA, 20 bp, Paenibacillus macerans
gacggtacctagagaagaaa

SEQ ID NO: 44434 - DNA, 20 bp, Haemophilus actinemycetemcomitans
ccaaattgacgttaaataca

SEQ ID NO: 44435 - DNA, 20 bp, Bacteroides distasonis
actagctgtttgcgatacac

SEQ ID NO: 44436 - DNA, 20 bp, Rothia dentocariosa
tgacatgcattagatcgcgt

SEQ ID NO: 44437 - DNA, 20 bp, Nocardia asteroides
cttcggtaactgacctagcg

SEQ ID NO: 44438 - DNA, 20 bp, Prevotella corporis
gcagactaataccttatgtc

SEQ ID NO: 44439 - DNA, 20 bp, Bacillus halodurans
gagcggaccaaagggagctt

SEQ ID NO: 44440 - DNA, 20 bp, Bacteroides stercoris
cgacgtggtgctaatcccga

SEQ ID NO: 44441 - DNA, 20 bp, Moraxella  catarrhalis
ttctgatacttagtggcgga

SEQ ID NO: 44442 - DNA, 20 bp, Peptoniphilus indolicus
ggggacagtattacaggtgg

SEQ ID NO: 44443 - DNA, 20 bp, Campylobacter lari
taagagagcttgctctttta

SEQ ID NO: 44444 - DNA, 20 bp, Bacillus niacini
tccttttcctctcatgaggg

SEQ ID NO: 44445 - DNA, 20 bp, Streptococcus hyovaginalis
gttataagcgaagaacggga

SEQ ID NO: 44446 - DNA, 20 bp, Arcanobacterium bernardiae
tggttgagggtatgtgcaga

SEQ ID NO: 44447 - DNA, 20 bp, Moraxella osloensis
cgaacgatgactctctagct

SEQ ID NO: 44448 - DNA, 20 bp, Paenibacillus thiaminolyticus
aactcacggaaacgtgggct

SEQ ID NO: 44449 - DNA, 20 bp, Peptostreptococcus anaerobius
gataacatactgaaaagttt

SEQ ID NO: 44450 - DNA, 20 bp, Arcanobacterium bernardiae
cagtacagaacaaggccttt

SEQ ID NO: 44451 - DNA, 20 bp, Rhizobium radiobacter
cggggtttgggcagtggaga

SEQ ID NO: 44452 - DNA, 20 bp, Actinomyces turicensis
aagccgcagctttgggttgt

SEQ ID NO: 44453 - DNA, 20 bp, Shigella flexneri
cccttgaggtgtggcttccg

SEQ ID NO: 44454 - DNA, 20 bp, Acinetobacter calcoaceticus
ggtgcttgcactatcactta

SEQ ID NO: 44455 - DNA, 20 bp, Propionibacterium freudenreichii
tctgggcttgctttcgatac

SEQ ID NO: 44456 - DNA, 20 bp, Prevotella melaninogenica
caggtaccatacgaataagg

SEQ ID NO: 44457 - DNA, 20 bp, Bacteroides thetaiotaomicron
accgcatggtcttgttatta

SEQ ID NO: 44458 - DNA, 20 bp, Fusobacterium nucleatum
acagatagggacaacatttg

SEQ ID NO: 44459 - DNA, 19 bp, Aeromonas veronii
accctaggggaacctgcgg

SEQ ID NO: 44460 - DNA, 20 bp, Helcococcus kunzii
tgtaaagttctgtccttagc

SEQ ID NO: 44461 - DNA, 20 bp, Paenibacillus validus
gccaaggaagaacgcctcgg

SEQ ID NO: 44462 - DNA, 20 bp, Gemella haemolysans
tactgtgaggacacaagaga

SEQ ID NO: 44463 - DNA, 20 bp, Rothia dentocariosa
tggagtggttttagatgggc

SEQ ID NO: 44464 - DNA, 20 bp, Pediococcus dextrinicus
ggctagtacaacgagttgcg

SEQ ID NO: 44465 - DNA, 20 bp, Clostridium cadaveris
aatacccaaagtccgtgagg

SEQ ID NO: 44466 - DNA, 20 bp, Rothia mucilaginosa
ggatacgaccaatctccgca

SEQ ID NO: 44467 - DNA, 20 bp, Veillonella atypica
attgatggacagaaccagag

SEQ ID NO: 44468 - DNA, 20 bp, Streptococcus thoraltensis
gcgtaggtaacctaccttta

SEQ ID NO: 44469 - DNA, 20 bp, Methylobacterium mesophilicum
gcttgcacctcagtagcgca

SEQ ID NO: 44470 - DNA, 20 bp, Bacillus lentus
accaacaaaaagcaagcttc

SEQ ID NO: 44471 - DNA, 20 bp, Acinetobacter genospecies 3
gtagctagcctaactgcaaa

SEQ ID NO: 44472 - DNA, 20 bp, Campylobacter lari
ttgctaacacttcgggtgag

SEQ ID NO: 44473 - DNA, 20 bp, Tissierella praeacuta
catgcccctgaccgtcctag

SEQ ID NO: 44474 - DNA, 20 bp, Abiotrophia defectiva
tagagaagaacagcgcatag

SEQ ID NO: 44475 - DNA, 20 bp, Prevotella melaninogenica
tgcactcaatggacgtcgac

SEQ ID NO: 44476 - DNA, 20 bp, Arcanobacterium bernardiae
ccttttccacgggttctgcg

SEQ ID NO: 44477 - DNA, 20 bp, Prevotella oris
ccgtggattaagcgtgttgt

SEQ ID NO: 44478 - DNA, 20 bp, Anaerococcus tetradius
gtatgggaagaaaatgacag

SEQ ID NO: 44479 - DNA, 20 bp, Bacillus sp
tgtaagactaggataactcc

SEQ ID NO: 44480 - DNA, 20 bp, Bacteroides capilosus
aactgtagttcttgagtgct

SEQ ID NO: 44481 - DNA, 20 bp, Eggerthella lenta
atactcctcgcccccctcct

SEQ ID NO: 44482 - DNA, 20 bp, Streptococcus constellatus
ttctgtgagttgcgaacggg

SEQ ID NO: 44483 - DNA, 20 bp, Macrococcus caseolyticus
tacgttagtaactgaacgta

SEQ ID NO: 44484 - DNA, 20 bp, Anaerococcus prevotii
ccctcttcttcggaagcctc

SEQ ID NO: 44485 - DNA, 20 bp, Streptococcus infantis
ctgaaggaggagcttgctct

SEQ ID NO: 44486 - DNA, 20 bp, Bacteroides thetaiotaomicron
aactggagatggcgaccggc

SEQ ID NO: 44487 - DNA, 20 bp, Brevibacillus choshinensis
gcggaccaatgaagagcttg

SEQ ID NO: 44488 - DNA, 20 bp, Myroides odoratus
tcggactgagtggctaagcg

SEQ ID NO: 44489 - DNA, 20 bp, Leptotrichia buccalis
acctgaagccgccggtccaa

SEQ ID NO: 44490 - DNA, 20 bp, Neisseria cinerea
ccgcaaggggtccgcttacc

SEQ ID NO: 44491 - DNA, 20 bp, Paenibacillus thiaminolyticus
gccacttatggatggaccta

SEQ ID NO: 44492 - DNA, 20 bp, Leptotrichia buccalis
cttgacatcctacgaatgcc

SEQ ID NO: 44493 - DNA, 20 bp, Leuconostoc lactis
gaatgtatctgatagtaact

SEQ ID NO: 44494 - DNA, 20 bp, Streptococcus bovis
gcttgctagagtagaaggag

SEQ ID NO: 44495 - DNA, 20 bp, Cardiobacterium hominis
gtagcttaacttaggagggc

SEQ ID NO: 44496 - DNA, 20 bp, Listeria seeligeri
tgctttgaaagatggtttcg

SEQ ID NO: 44497 - DNA, 20 bp, Bacteroides eggerthii
cactattaaagaatttcggt

SEQ ID NO: 44498 - DNA, 20 bp, Streptococcus thermophilus
aataccgcataacaatggat

SEQ ID NO: 44499 - DNA, 20 bp, Campylobacter lari
acggctgctaatactctata

SEQ ID NO: 44500 - DNA, 20 bp, Streptococcus dysgalactiae
atgatggtgggagtggaaaa

SEQ ID NO: 44501 - DNA, 20 bp, Campylobacter curvus
gtatagctaatctgccccat

SEQ ID NO: 44502 - DNA, 20 bp, Bacillus coagulans
ctctgacctccctggagaca

SEQ ID NO: 44503 - DNA, 20 bp, Peptostreptococcus anaerobius
gttgcaggggaagataatga

SEQ ID NO: 44504 - DNA, 20 bp, Veillonella atypica
agatggttcctcttcttcgg

SEQ ID NO: 44505 - DNA, 20 bp, Veillonella atypica
gatggttcctcttcttcgga

SEQ ID NO: 44506 - DNA, 20 bp, Prevotella bivia
ggagcgtaggccgtttggta

SEQ ID NO: 44507 - DNA, 20 bp, Bacteroides capilosus
ccgactaacgaagcagagat

SEQ ID NO: 44508 - DNA, 20 bp, Tissierella praeacuta
gcagctacttagcgataaga

SEQ ID NO: 44509 - DNA, 20 bp, Bacteroides forsythus
gtttgcgatatagtgtaagc

SEQ ID NO: 44510 - DNA, 20 bp, Lactococcus raffinolactis
cttgacatactcgtgctatt

SEQ ID NO: 44511 - DNA, 20 bp, Serratia marcescens
ttcatcaattgacgttactc

SEQ ID NO: 44512 - DNA, 20 bp, Gemella bergeri
ggtctcaaaagagatcagtg

SEQ ID NO: 44513 - DNA, 20 bp, Bacteroides capilosus
cggaattccgtgtgtagcgg

SEQ ID NO: 44514 - DNA, 20 bp, Facklamia ignava
cagcgggggataaccatcgg

SEQ ID NO: 44515 - DNA, 20 bp, Clostridium sordellii
atatgagagtcgcatggctt

SEQ ID NO: 44516 - DNA, 20 bp, Campylobacter rectus
ctacaatggcgtatacaata

SEQ ID NO: 44517 - DNA, 20 bp, Arthrobacter globiformis
gatttattggtcttggatgg

SEQ ID NO: 44518 - DNA, 20 bp, Vibrio metschnikovii
cttgacatctacaggatcct

SEQ ID NO: 44519 - DNA, 20 bp, Bacteroides capilosus
tgccaaagatttatcgctct

SEQ ID NO: 44520 - DNA, 20 bp, Vibrio vulnificus
gtggtgtcgttaatagcggc

SEQ ID NO: 44521 - DNA, 20 bp, Bacillus flexus
gattagaagcttgcttctat

SEQ ID NO: 44522 - DNA, 20 bp, Moraxella osloensis
gactctctagcttgctagag

SEQ ID NO: 44523 - DNA, 20 bp, Haemophilus actinemycetemcomitans
gggtaaccaaccagcgatgg

SEQ ID NO: 44524 - DNA, 20 bp, Bacillus oleronius
gataacttttttcttcgcat

SEQ ID NO: 44525 - DNA, 20 bp, Bacteroides thetaiotaomicron
ggagcgtaggtggacagtta

SEQ ID NO: 44526 - DNA, 20 bp, Budvicia aquatica
tggaggttgtgggcatgacc

SEQ ID NO: 44527 - DNA, 20 bp, Fusobacterium mortiferum
cgtctaggcggtttggtaag

SEQ ID NO: 44528 - DNA, 20 bp, Sphingobacterium multivorum
ggggctctgagaggagaatc

SEQ ID NO: 44529 - DNA, 20 bp, Clostridium paraputrificum
taagggaggaagccacctaa

SEQ ID NO: 44530 - DNA, 20 bp, Bacillus fusiformis
agtagtaactggctgtacct

SEQ ID NO: 44531 - DNA, 20 bp, Oligella urethralis
ctaccgtcagcatcttaagg

SEQ ID NO: 44532 - DNA, 20 bp, Proteus vulgaris
atacctttgtcaattgacgt

SEQ ID NO: 44533 - DNA, 20 bp, Arcanobacterium bernardiae
caaggcctttttggttgagg

SEQ ID NO: 44534 - DNA, 20 bp, Bacteroides thetaiotaomicron
aatgtgaaggtgctgcatgg

SEQ ID NO: 44535 - DNA, 20 bp, Facklamia ignava
gaatagcctgtagagtaact

SEQ ID NO: 44536 - DNA, 20 bp, Propionibacterium avidum
actgggagtgctcagagatg

SEQ ID NO: 44537 - DNA, 20 bp, Actinomyces bovis
atgcttcttatatgacggta

SEQ ID NO: 44538 - DNA, 20 bp, Moraxella osloensis
ggcgcaagctcttgctatta

SEQ ID NO: 44539 - DNA, 20 bp, Brevibacillus laterosporus
ttcgcgagaagatgctaatc

SEQ ID NO: 44540 - DNA, 20 bp, Campylobacter sputorum
acaacacttagaaatgagtg

SEQ ID NO: 44541 - DNA, 20 bp, Bacteroides uniformis
ttatcgatagttaccatcag

SEQ ID NO: 44542 - DNA, 20 bp, Streptococcus dysgalactiae
atcctcctgaccggtctaga

SEQ ID NO: 44543 - DNA, 20 bp, Proteus vulgaris
tgtggcttctggagctaacg

SEQ ID NO: 44544 - DNA, 20 bp, Micrococcus luteus
tctcgatcgccgtagagata

SEQ ID NO: 44545 - DNA, 20 bp, Myroides odoratus
cggagaaattcggattaatg

SEQ ID NO: 44546 - DNA, 20 bp, Brevibacterium epidermidis
tggaaacagttcttctcttt

SEQ ID NO: 44547 - DNA, 20 bp, Prevotella intermedia
cgctgttagcgcctggcgtt

SEQ ID NO: 44548 - DNA, 20 bp, Peptostreptococcus anaerobius
ggtctttcaagtcggtggtt

SEQ ID NO: 44549 - DNA, 20 bp, Corynebacterium glucuronolyticum
gctggtacagtgcgtgtgcg

SEQ ID NO: 44550 - DNA, 20 bp, Bacillus coagulans
acatcctctgacctccctgg

SEQ ID NO: 44551 - DNA, 20 bp, Clostridium ramosum
ggacttatggcgcattagct

SEQ ID NO: 44552 - DNA, 20 bp, Listeria welshimeri
cacggctttgaaagatggtt

SEQ ID NO: 44553 - DNA, 20 bp, Bacteroides merdae
taatctccaaaccatgtctc

SEQ ID NO: 44554 - DNA, 20 bp, Facklamia ignava
cctcagtgctggcgcaaacg

SEQ ID NO: 44555 - DNA, 20 bp, Brochothrix campestris
aagacttgaggacagaagag

SEQ ID NO: 44556 - DNA, 20 bp, Kingella denitrificans
cttgacatgtacggaagaac

SEQ ID NO: 44557 - DNA, 20 bp, Eikenella corrodens
ttttgctgacggtacctaaa

SEQ ID NO: 44558 - DNA, 20 bp, Actinomyces neuii
cttttggtgagagtggcgaa

SEQ ID NO: 44559 - DNA, 20 bp, Tissierella praeacuta
ggtctcgcgtcccattagtt

SEQ ID NO: 44560 - DNA, 20 bp, Neisseria lactamica
ggggaagaaaaggtcggggt

SEQ ID NO: 44561 - DNA, 20 bp, Bacillus fusiformis
tacagtagtaactggctgta

SEQ ID NO: 44562 - DNA, 20 bp, Atopobium parvulum
cgtcgtggccgaaaggagcc

SEQ ID NO: 44563 - DNA, 20 bp, Campylobacter concisus
gtggggctggtgtacaggtg

SEQ ID NO: 44564 - DNA, 20 bp, Campylobacter lari
cactggaggacaacagttag

SEQ ID NO: 44565 - DNA, 20 bp, Facklamia sourekii
cactagaggatggtcccgcg

SEQ ID NO: 44566 - DNA, 20 bp, Bacteroides ureolyticus
actcctatttaacataagtt

SEQ ID NO: 44567 - DNA, 20 bp, Campylobacter sputorum
tataaattattactaatatt

SEQ ID NO: 44568 - DNA, 20 bp, Moraxella osloensis
tagattagacgttacctgca

SEQ ID NO: 44569 - DNA, 20 bp, Streptococcus pyogenes
aaatccaccaagtgacggta

SEQ ID NO: 44570 - DNA, 20 bp, Micrococcus luteus
gacatgttctcgatcgccgt

SEQ ID NO: 44571 - DNA, 20 bp, Moraxella lacunata
atacctacaagccctgacgt

SEQ ID NO: 44572 - DNA, 20 bp, Aerococcus christensenii
cattaactagttggcgaggt

SEQ ID NO: 44573 - DNA, 20 bp, Facklamia ignava
atgactaataccgcatagtt

SEQ ID NO: 44574 - DNA, 20 bp, Streptococcus thermophilus
gtgcttgcaccgagcggatg

SEQ ID NO: 44575 - DNA, 20 bp, Propionibacterium freudenreichii
ttcggctggggactcattgg

SEQ ID NO: 44576 - DNA, 20 bp, Corynebacterium glucuronolyticum
cagggacgaagtttttttga

SEQ ID NO: 44577 - DNA, 20 bp, Streptococcus sobrinus
agtttttcttcggaacatcg

SEQ ID NO: 44578 - DNA, 20 bp, Prevotella bivia
gtgaaatgtaggagctcaac

SEQ ID NO: 44579 - DNA, 20 bp, Vibrio mimicus
gttaataccttaatcatttg

SEQ ID NO: 44580 - DNA, 20 bp, Anaerococcus prevotii
ggcagtagcttaactactgt

SEQ ID NO: 44581 - DNA, 20 bp, Gemella morbillorum
gcttaaaaggtgcaattgct

SEQ ID NO: 44582 - DNA, 20 bp, Bacillus coagulans
gggctaataccagatagttt

SEQ ID NO: 44583 - DNA, 20 bp, Prevotella melaninogenica
cgatgacggcatcagatttg

SEQ ID NO: 44584 - DNA, 20 bp, Acinetobacter baumannii
cttgctaccggacctagcgg

SEQ ID NO: 44585 - DNA, 20 bp, Staphylococcus capitis
cttgacatatacaagacaga

SEQ ID NO: 44586 - DNA, 20 bp, Paenibacillus thiaminolyticus
actcacggaaacgtgggcta

SEQ ID NO: 44587 - DNA, 20 bp, Paenibacillus validus
tgccaaggaagaacgcctcg

SEQ ID NO: 44588 - DNA, 20 bp, Listeria monocytogenes
cgcatgccacgcttttgaaa

SEQ ID NO: 44589 - DNA, 20 bp, Finegoldia magna
cgcgtgagcaacctgcctat

SEQ ID NO: 44590 - DNA, 20 bp, Actinomyces turicensis
ggtcaagccgcagctttggg

SEQ ID NO: 44591 - DNA, 20 bp, Streptococcus agalactiae
ccgcataagagtaattaaca

SEQ ID NO: 44592 - DNA, 20 bp, Oligella urethralis
gcctaagacttttcttcgtt

SEQ ID NO: 44593 - DNA, 20 bp, Bacillus pallidus
ttagagggtatccacccttt

SEQ ID NO: 44594 - DNA, 20 bp, Moraxella bovis
acaagccctgacgttaccta

SEQ ID NO: 44595 - DNA, 20 bp, Streptococcus dysgalactiae
gtggctcaaccactgtacgc

SEQ ID NO: 44596 - DNA, 20 bp, Tissierella praeacuta
ttatgacacttaaatgtcgc

SEQ ID NO: 44597 - DNA, 20 bp, Bacillus coagulans
taaaactctgttgccgggga

SEQ ID NO: 44598 - DNA, 20 bp, Serratia liquefaciens
gtgaagtcggaacaaggtaa

SEQ ID NO: 44599 - DNA, 20 bp, Campylobacter concisus
gtgcttgcactgggtggatg

SEQ ID NO: 44600 - DNA, 20 bp, Arcanobacterium bernardiae
cagagatggtgcagccttcg

SEQ ID NO: 44601 - DNA, 20 bp, Rhizobium radiobacter
tttgggcagtggagacattg

SEQ ID NO: 44602 - DNA, 20 bp, Campylobacter sputorum
atggcagtaatccacctaac

SEQ ID NO: 44603 - DNA, 20 bp, Corynebacterium group F
ataggacaactttttggata

SEQ ID NO: 44604 - DNA, 20 bp, Actinomyces bovis
tagttatggcggatacaggt

SEQ ID NO: 44605 - DNA, 20 bp, Streptococcus parauberis
acgtaggtctcgagcgttgt

SEQ ID NO: 44606 - DNA, 20 bp, Streptococcus parasanguinis
taaaagtcgacattgcatga

SEQ ID NO: 44607 - DNA, 20 bp, Veillonella atypica
ttgacattgatggacagaac

SEQ ID NO: 44608 - DNA, 20 bp, Helcococcus ovis
gtaactaagaagcaagccct

SEQ ID NO: 44609 - DNA, 20 bp, Alicyclobacillus acidocaldarius
gtcaagcagtttccaaagcc

SEQ ID NO: 44610 - DNA, 20 bp, Leptotrichia buccalis
ttgccctgcagacagggata

SEQ ID NO: 44611 - DNA, 20 bp, Citrobacter sedlakii
catccacggaagactgcaga

SEQ ID NO: 44612 - DNA, 20 bp, Eggerthella lenta
ctcaacccccggccggatcc

SEQ ID NO: 44613 - DNA, 20 bp, Enterobacter cloacae
ggaggaaggcgacagggtta

SEQ ID NO: 44614 - DNA, 20 bp, Actinomyces bovis
cgataggaagagggaatgct

SEQ ID NO: 44615 - DNA, 20 bp, Capnocytophaga gingivalis
ggtgtacgtgtacattgatg

SEQ ID NO: 44616 - DNA, 20 bp, Peptostreptococcus anaerobius
tacggcatcgtagatatatc

SEQ ID NO: 44617 - DNA, 20 bp, Staphylococcus aureus
ggacgagaagcttgcttctc

SEQ ID NO: 44618 - DNA, 20 bp, Veillonella parvula
gatcagtcagtctgtcttaa

SEQ ID NO: 44619 - DNA, 20 bp, Bacillus oleronius
cttcgcatgagggagaattg

SEQ ID NO: 44620 - DNA, 20 bp, Propionibacterium avidum
gtggttgattgcgtcggaag

SEQ ID NO: 44621 - DNA, 20 bp, Prevotella loescheii
cttcagttgccatcgggtta

SEQ ID NO: 44622 - DNA, 20 bp, Bacillus lentus
tccccgaagggaagaccctg

SEQ ID NO: 44623 - DNA, 20 bp, Eggerthella lenta
gatactcctcgcccccctcc

SEQ ID NO: 44624 - DNA, 20 bp, Haemophilus haemolyticus
agactgggtaactagagtac

SEQ ID NO: 44625 - DNA, 20 bp, Bacillus schlegellii
tgtctcttagcggcggacgg

SEQ ID NO: 44626 - DNA, 20 bp, Corynebacterium coyleae
gacatacaccagatcgccgt

SEQ ID NO: 44627 - DNA, 20 bp, Bacillus cereus
attgagagcttgctctcaag

SEQ ID NO: 44628 - DNA, 20 bp, Anaerococcus prevotii
taagcatttgaaactgcata

SEQ ID NO: 44629 - DNA, 20 bp, Unknown Organism
  oligonucleotide from CDC group EF-4B
gagaaggaaagcaggggctc

SEQ ID NO: 44630 - DNA, 20 bp, Streptococcus gallolyticus
gttagagacttgaaagatgc

SEQ ID NO: 44631 - DNA, 20 bp, Leclercia adecarboxylata
aggggcaagcgttaatcgga

SEQ ID NO: 44632 - DNA, 20 bp, Corynebacterium glucuronolyticum
aagtttttttgacggtacct

SEQ ID NO: 44633 - DNA, 20 bp, Serratia proteamaculans
aggaagggtagtgtgttaat

SEQ ID NO: 44634 - DNA, 20 bp, Streptococcus parasanguinis
aagtcgacattgcatgatgt

SEQ ID NO: 44635 - DNA, 20 bp, Leptotrichia buccalis
atgctgcaggagagctttgc

SEQ ID NO: 44636 - DNA, 20 bp, Streptococcus constellatus
agtttactacaccgtattct

SEQ ID NO: 44637 - DNA, 20 bp, Aerococcus viridans
cgtaaggaatctacctataa

SEQ ID NO: 44638 - DNA, 20 bp, Clostridium glycolicum
tcaaagctccggcggtatga

SEQ ID NO: 44639 - DNA, 20 bp, Corynebacterium mycetoides
aacgcgtgtgcgacactgtg

SEQ ID NO: 44640 - DNA, 20 bp, Enterococcus cecorum
tgagagtggaaagttcatcc

SEQ ID NO: 44641 - DNA, 20 bp, Peptostreptococcus anaerobius
acatgataatatatatttac

SEQ ID NO: 44642 - DNA, 20 bp, Cellulosimicrobium cellulans
tgacatgcacgagaagccac

SEQ ID NO: 44643 - DNA, 20 bp, Tissierella praeacuta
tgctaacagataagctgagc

SEQ ID NO: 44644 - DNA, 20 bp, Corynebacterium coyleae
acaacgcgtttgcgagcctg

SEQ ID NO: 44645 - DNA, 20 bp, Facklamia sourekii
cgtgaggccaagcgaatctc

SEQ ID NO: 44646 - DNA, 20 bp, Anaerobiospirillum succiniciproducens
agcttgaacttcggtttggg

SEQ ID NO: 44647 - DNA, 20 bp, Kocuria kristinae
gggtctaatacccggatgcg

SEQ ID NO: 44648 - DNA, 20 bp, Propionibacterium granulosum
cgtccactgttgccagcaat

SEQ ID NO: 44649 - DNA, 20 bp, Corynebacterium group F
ggatgctaatcgcacaaagc

SEQ ID NO: 44650 - DNA, 20 bp, Anaerococcus prevotii
agagtagaggtaagtggaat

SEQ ID NO: 44651 - DNA, 20 bp, Clostridium clostridiiforme
ccgcataagcgcacagggcc

SEQ ID NO: 44652 - DNA, 20 bp, Bacillus fusiformis
ttcggctgtcgctataggat

SEQ ID NO: 44653 - DNA, 20 bp, Helcococcus ovis
atcgcatgataattaagtta

SEQ ID NO: 44654 - DNA, 20 bp, Lactococcus garvieae
ccgcaaggagggcgcttcct

SEQ ID NO: 44655 - DNA, 20 bp, Finegoldia magna
taataccgcataaaatcgta

SEQ ID NO: 44656 - DNA, 20 bp, Bacillus coagulans
tcctccgcatggaggaaaaa

SEQ ID NO: 44657 - DNA, 20 bp, Gemella haemolysans
aagaatgattgtgtagtaac

SEQ ID NO: 44658 - DNA, 20 bp, Peptoniphilus indolicus
caaagtgaattagcggtcaa

SEQ ID NO: 44659 - DNA, 20 bp, Actinomyces naeslundii
cttcttctggataaccgcat

SEQ ID NO: 44660 - DNA, 20 bp, Corynebacterium coyleae
taccggataggaccacattt

SEQ ID NO: 44661 - DNA, 20 bp, Leuconostoc fallax
agctcaactgtggaatggct

SEQ ID NO: 44662 - DNA, 20 bp, Acinetobacter baumannii
gcttgctactggacctagcg

SEQ ID NO: 44663 - DNA, 20 bp, Paenibacillus thiaminolyticus
agtcgagcggagcgacggtt

SEQ ID NO: 44664 - DNA, 20 bp, Corynebacterium macginleyi
tggcctaaacgtgttaggga

SEQ ID NO: 44665 - DNA, 20 bp, Streptococcus suis
cataacagtatttaccgcat

SEQ ID NO: 44666 - DNA, 20 bp, Gemella morbillorum
agaatggatatgtagtaact

SEQ ID NO: 44667 - DNA, 20 bp, Chromobacterium violaceum
agacctcgcgttatacgagc

SEQ ID NO: 44668 - DNA, 20 bp, Leptotrichia buccalis
tgcagacagggataacagac

SEQ ID NO: 44669 - DNA, 20 bp, Streptococcus constellatus
agaacatttactgcatggta

SEQ ID NO: 44670 - DNA, 20 bp, Corynebacterium glucuronolyticum
gagatagttcgtcccttgtg

SEQ ID NO: 44671 - DNA, 20 bp, Campylobacter curvus
ctgctaataccttatactcc

SEQ ID NO: 44672 - DNA, 20 bp, Tissierella praeacuta
gaagtttttaaagaagattt

SEQ ID NO: 44673 - DNA, 20 bp, Burkholderia gladioli
ttcggggatgacggtaccgg

SEQ ID NO: 44674 - DNA, 20 bp, Neisseria lactamica
cttatgaccggggcttcaca

SEQ ID NO: 44675 - DNA, 20 bp, Bacteroides merdae
gtttgaggtaggcggaatgc

SEQ ID NO: 44676 - DNA, 20 bp, Leuconostoc lactis
taacaccgcatggtgtaggg

SEQ ID NO: 44677 - DNA, 20 bp, Bacillus alcalophilus
gctccggctatcactacggg

SEQ ID NO: 44678 - DNA, 20 bp, Lactococcus garvieae
tccttcgggacacgggatac

SEQ ID NO: 44679 - DNA, 20 bp, Eggerthella lenta
cccgcaaggggcggaggcgt

SEQ ID NO: 44680 - DNA, 20 bp, Campylobacter concisus
atcaaagccggtcgtagttc

SEQ ID NO: 44681 - DNA, 20 bp, Bacteroides thetaiotaomicron
aataaagttttccacgtgtg

SEQ ID NO: 44682 - DNA, 20 bp, Clostridium sordellii
tttggaactgtaggacttga

SEQ ID NO: 44683 - DNA, 20 bp, Eggerthella lenta
accagggcttgacatggacg

SEQ ID NO: 44684 - DNA, 20 bp, Acinetobacter calcoaceticus
aataccttcagatagtggac

SEQ ID NO: 44685 - DNA, 20 bp, Campylobacter lari
agaaccttatagagatatga

SEQ ID NO: 44686 - DNA, 20 bp, Brevibacillus brevis
tgaacctggagcttgctcta

SEQ ID NO: 44687 - DNA, 20 bp, Abiotrophia defectiva
gaagaacagcgcatagagta

SEQ ID NO: 44688 - DNA, 20 bp, Tissierella praeacuta
tcaaccgtggtaagcatttg

SEQ ID NO: 44689 - DNA, 20 bp, Paenibacillus macerans
gctgtggctcaaccacagtt

SEQ ID NO: 44690 - DNA, 20 bp, Veillonella atypica
acattgatggacagaactag

SEQ ID NO: 44691 - DNA, 20 bp, Arcanobacterium bernardiae
caggttactgggccaccact

SEQ ID NO: 44692 - DNA, 20 bp, Bacillus oleronius
agaattgaaagatggcttcg

SEQ ID NO: 44693 - DNA, 20 bp, Bacillus coagulans
cgccttgacggtacccggcc

SEQ ID NO: 44694 - DNA, 20 bp, Anaerococcus tetradius
agaataaggtccggctaaat

SEQ ID NO: 44695 - DNA, 20 bp, Burkholderia multivorans
aagaaatccctggctctaat

SEQ ID NO: 44696 - DNA, 20 bp, Moraxella bovis
ctagatatgattagtggcga

SEQ ID NO: 44697 - DNA, 20 bp, Bacteroides eggerthii
attaatacccgatagtatag

SEQ ID NO: 44698 - DNA, 20 bp, Propionibacterium avidum
aggcccctttgggggtactc

SEQ ID NO: 44699 - DNA, 20 bp, Streptococcus suis
aacagtatttaccgcatggt

SEQ ID NO: 44700 - DNA, 20 bp, Burkholderia gladioli
cttcggggatgacggtaccg

SEQ ID NO: 44701 - DNA, 20 bp, Propionibacterium freudenreichii
gaaactggtggtaatcccga

SEQ ID NO: 44702 - DNA, 20 bp, Prevotella melaninogenica
gaagtaaagatttatcggta

SEQ ID NO: 44703 - DNA, 20 bp, Serratia marcescens
cgctcatcaattgacgttac

SEQ ID NO: 44704 - DNA, 20 bp, Bacteroides forsythus
ttgcatgtaccttgtgaata

SEQ ID NO: 44705 - DNA, 20 bp, Corynebacterium confusum
accggataggaccgcacttt

SEQ ID NO: 44706 - DNA, 20 bp, Corynebacterium glucuronolyticum
cttaacttttggttggcagg

SEQ ID NO: 44707 - DNA, 20 bp, Anaerococcus prevotii
tagcttaactactgtaagca

SEQ ID NO: 44708 - DNA, 20 bp, Corynebacterium amycolatum
ccatcgacgaagggtttctg

SEQ ID NO: 44709 - DNA, 20 bp, Yersinia ruckeri
aggaagggttaagtgttaat

SEQ ID NO: 44710 - DNA, 20 bp, Prevotella loescheii
gaaaccggtgattggggcta

SEQ ID NO: 44711 - DNA, 20 bp, Neisseria meningitidis
ccgctgatattagcaacagc

SEQ ID NO: 44712 - DNA, 20 bp, Aerococcus christensenii
taccgataagcgggggacaa

SEQ ID NO: 44713 - DNA, 20 bp, Prevotella melaninogenica
agacgctcaacgtctgactt

SEQ ID NO: 44714 - DNA, 20 bp, Clostridium histolyticum
tcccggggcttaaccccggt

SEQ ID NO: 44715 - DNA, 20 bp, Neisseria cinerea
aagtaggtaggataaccgca

SEQ ID NO: 44716 - DNA, 20 bp, Cardiobacterium hominis
aacgatggagcttgctccag

SEQ ID NO: 44717 - DNA, 20 bp, Lactococcus lactis
ataccgcataaaaactttaa

SEQ ID NO: 44718 - DNA, 20 bp, Propionibacterium acnes
ccgctttcgcctgtgacgaa

SEQ ID NO: 44719 - DNA, 20 bp, Campylobacter sputorum
caacacttagaaatgagtgc

SEQ ID NO: 44720 - DNA, 20 bp, Anaerococcus tetradius
acacaaggggatagcctttg

SEQ ID NO: 44721 - DNA, 20 bp, Facklamia languida
gactaataccgcatagaatc

SEQ ID NO: 44722 - DNA, 20 bp, Streptococcus thermophilus
gagaggagcttgctcttctt

SEQ ID NO: 44723 - DNA, 20 bp, Bacillus circulans
agctgaaagacggtttacgc

SEQ ID NO: 44724 - DNA, 20 bp, Propionibacterium freudenreichii
gatgggcgtgcctttttggc

SEQ ID NO: 44725 - DNA, 20 bp, Bacteroides uniformis
caccaagccttcgatggata

SEQ ID NO: 44726 - DNA, 20 bp, Alloiococcus otitis
cgaggtttagctaatctccc

SEQ ID NO: 44727 - DNA, 20 bp, Anaerococcus prevotii
gacttactgggctcattctg

SEQ ID NO: 44728 - DNA, 20 bp, Prevotella intermedia
gtacgggagtgttactgacg

SEQ ID NO: 44729 - DNA, 20 bp, Peptostreptococcus anaerobius
agttagcctccgaaactgga

SEQ ID NO: 44730 - DNA, 20 bp, Bacteroides thetaiotaomicron
gaaagattaatatccgatag

SEQ ID NO: 44731 - DNA, 20 bp, Leptotrichia buccalis
aacaggcagtgccttcggga

SEQ ID NO: 44732 - DNA, 20 bp, Corynebacterium mycetoides
ggaaaggccgaagcttgctt

SEQ ID NO: 44733 - DNA, 20 bp, Suttonella indologenes
ggcagccttctggggcaata

SEQ ID NO: 44734 - DNA, 20 bp, Aneurinibacillus aneurinilyticus
gtctgaaagagaaagacctt

SEQ ID NO: 44735 - DNA, 20 bp, Eikenella corrodens
ccttccagagacggaagggt

SEQ ID NO: 44736 - DNA, 20 bp, Paenibacillus thiaminolyticus
ataactcacggaaacgtggg

SEQ ID NO: 44737 - DNA, 20 bp, Streptococcus bovis
tagaaggagttgcgaacggg

SEQ ID NO: 44738 - DNA, 20 bp, Proteus vulgaris
accaaagcaggggctcttcg

SEQ ID NO: 44739 - DNA, 20 bp, Prevotella bivia
aatacgatctaatccttaaa

SEQ ID NO: 44740 - DNA, 20 bp, Gemella haemolysans
ctcatagactgggacaacta

SEQ ID NO: 44741 - DNA, 20 bp, Brevibacillus thermoruber
caagctaccacttgcggatg

SEQ ID NO: 44742 - DNA, 20 bp, Corynebacterium urealyticum
tggggatttttcacgatttc

SEQ ID NO: 44743 - DNA, 20 bp, Bacteroides distasonis
cttacccgggtttgaacgca

SEQ ID NO: 44744 - DNA, 20 bp, Corynebacterium auris
tgagcctcttccacggggtt

SEQ ID NO: 44745 - DNA, 20 bp, Microbacterium terregens
agcttgctctctggatcagt

SEQ ID NO: 44746 - DNA, 20 bp, Acinetobacter haemolyticus
cgagcggggaagtgtagctt

SEQ ID NO: 44747 - DNA, 20 bp, Streptococcus constellatus
atgtttaaaaggtgcaagag

SEQ ID NO: 44748 - DNA, 20 bp, Brevibacillus choshinensis
gagctctcttcggagcagcg

SEQ ID NO: 44749 - DNA, 20 bp, Veillonella atypica
agtcggaagtgcccaaagcc

SEQ ID NO: 44750 - DNA, 20 bp, Clostridium clostridiiforme
gccttacactgggggataac

SEQ ID NO: 44751 - DNA, 20 bp, Brevibacillus laterosporus
gggctcaacctcggttcgca

SEQ ID NO: 44752 - DNA, 20 bp, Bacteroides uniformis
cgggaataaagtgaggcacg

SEQ ID NO: 44753 - DNA, 20 bp, Staphylococcus chromogenes
cttgacatcttttgaccact

SEQ ID NO: 44754 - DNA, 20 bp, Neisseria subflava
actgggtgactcgagtgtgt

SEQ ID NO: 44755 - DNA, 20 bp, Tetragenococcus halophilus
tgatggctggtcccgcggtg

SEQ ID NO: 44756 - DNA, 20 bp, Streptococcus constellatus
ttactaccccgtattctgtg

SEQ ID NO: 44757 - DNA, 20 bp, Dermabacter hominis
gagatgtggttttctttgga

SEQ ID NO: 44758 - DNA, 20 bp, Brevibacillus choshinensis
ggtgttggggactccaatcc

SEQ ID NO: 44759 - DNA, 20 bp, Moraxella bovis
cgaacgatgactatctagct

SEQ ID NO: 44760 - DNA, 20 bp, Brevibacterium epidermidis
tacactggaccgttctggaa

SEQ ID NO: 44761 - DNA, 20 bp, Kocuria kristinae
caccggatcgttccagagat

SEQ ID NO: 44762 - DNA, 20 bp, Clostridium botulinum
gagactgccgtggttaacgc

SEQ ID NO: 44763 - DNA, 20 bp, Chromobacterium violaceum
ggaaatcccgctggttaata

SEQ ID NO: 44764 - DNA, 20 bp, Fusobacterium mortiferum
caggagagctttgcgtccta

SEQ ID NO: 44765 - DNA, 20 bp, Bacillus coagulans
tagggaagaacaagtatgag

SEQ ID NO: 44766 - DNA, 20 bp, Clostridium ramosum
acttatggcgcattagctgg

SEQ ID NO: 44767 - DNA, 20 bp, Shewanella putrefaciens
agcacaagggagtttacttc

SEQ ID NO: 44768 - DNA, 20 bp, Bacteroides stercoris
gctacacggcgacgtggtgc

SEQ ID NO: 44769 - DNA, 20 bp, Anaerococcus prevotii
gtaagcatttgaaactgcat

SEQ ID NO: 44770 - DNA, 20 bp, Acinetobacter calcoaceticus
gtgatggtgcttgcactatc

SEQ ID NO: 44771 - DNA, 20 bp, Gemella bergeri
gtaacacctgaagacggtga

SEQ ID NO: 44772 - DNA, 20 bp, Bacteroides distasonis
ttacccgggtttgaacgcat

SEQ ID NO: 44773 - DNA, 20 bp, Oligella ureolytica
taccttaagatgctgacggt

SEQ ID NO: 44774 - DNA, 20 bp, Chromobacterium violaceum
gagcagccgacgtctgatta

SEQ ID NO: 44775 - DNA, 20 bp, Actinomyces bovis
ttcttatatgacggtacctt

SEQ ID NO: 44776 - DNA, 20 bp, Proteus vulgaris
tgtcgatttagaggttgtgg

SEQ ID NO: 44777 - DNA, 20 bp, Streptococcus gallolyticus
aacacatgttagagacttga

SEQ ID NO: 44778 - DNA, 20 bp, Leptotrichia buccalis
gcagtgccttcgggaacgta

SEQ ID NO: 44779 - DNA, 20 bp, Weeksella virosa
gtgactggatgcgaatctct

SEQ ID NO: 44780 - DNA, 20 bp, Streptococcus thermophilus
cgcataacaatggatgacac

SEQ ID NO: 44781 - DNA, 20 bp, Anaerococcus tetradius
atcttttgtatgggaagaaa

SEQ ID NO: 44782 - DNA, 20 bp, Citrobacter werkmanii
gttgccagcgatccggccgg

SEQ ID NO: 44783 - DNA, 20 bp, Vibrio cholerae
ccctctaccgggcaatttcc

SEQ ID NO: 44784 - DNA, 20 bp, Kingella denitrificans
taccactttttgttgacggt

SEQ ID NO: 44785 - DNA, 20 bp, Staphylococcus condimenti
tgccggataatatgcggaac

SEQ ID NO: 44786 - DNA, 20 bp, Peptostreptococcus anaerobius
cctatacacatggataacat

SEQ ID NO: 44787 - DNA, 20 bp, Corynebacterium group F
ccggataggacaactttttg

SEQ ID NO: 44788 - DNA, 20 bp, Neisseria elongata
atatattggaacgtaccggg

SEQ ID NO: 44789 - DNA, 20 bp, Helcococcus kunzii
atcatgccctatatgtcttg

SEQ ID NO: 44790 - DNA, 20 bp, Prevotella melaninogenica
cgaggggaaacggcattgag

SEQ ID NO: 44791 - DNA, 20 bp, Aerococcus christensenii
ttaaccgtggaagtgcattg

SEQ ID NO: 44792 - DNA, 20 bp, Actinomyces naeslundii
ctgggtctgtcgcatggtgg

SEQ ID NO: 44793 - DNA, 20 bp, Neisseria meningitidis
gccgctgatattagcaacag

SEQ ID NO: 44794 - DNA, 20 bp, Prevotella bivia
acttgagtgcgcacaacgta

SEQ ID NO: 44795 - DNA, 20 bp, Pediococcus pentosaceus
tttcttttaaaagatggctc

SEQ ID NO: 44796 - DNA, 20 bp, Bacteroides thetaiotaomicron
cacgtgtggaattttgtatg

SEQ ID NO: 44797 - DNA, 20 bp, Oligella urethralis
agcctaagacttttcttcgt

SEQ ID NO: 44798 - DNA, 20 bp, Anaerococcus prevotii
gaagcctcaatacaggtggt

SEQ ID NO: 44799 - DNA, 20 bp, Clostridium tetani
aggtgtaggagggtccaacc

SEQ ID NO: 44800 - DNA, 20 bp, Clostridium butyricum
ggaggaagccacttcggtgg

SEQ ID NO: 44801 - DNA, 20 bp, Paenibacillus validus
tgctctgagggtgacggtac

SEQ ID NO: 44802 - DNA, 20 bp, Kocuria rosea
tcaccggaccgccccagaga

SEQ ID NO: 44803 - DNA, 20 bp, Campylobacter coli
ttgctctgctagtcagggca

SEQ ID NO: 44804 - DNA, 20 bp, Alicyclobacillus acidocaldarius
cctgtgagtccccgcctcaa

SEQ ID NO: 44805 - DNA, 20 bp, Tissierella praeacuta
gacatgcccctgaccgtcct

SEQ ID NO: 44806 - DNA, 20 bp, Gemella haemolysans
taaaagttggttttgctaac

SEQ ID NO: 44807 - DNA, 20 bp, Paenibacillus amylolyticus
tgtttaaggccaaggctcaa

SEQ ID NO: 44808 - DNA, 20 bp, Bacteroides ureolyticus
gatagtctagagtaggggag

SEQ ID NO: 44809 - DNA, 20 bp, Achromobacter piechaudii
acgtcatgggttaatacccc

SEQ ID NO: 44810 - DNA, 20 bp, Anaerobiospirillum succiniciproducens
gcgtcccgcagttcggattg

SEQ ID NO: 44811 - DNA, 20 bp, Haemophilus influenzae
catcaaattgacgttaaata

SEQ ID NO: 44812 - DNA, 20 bp, Facklamia languida
ctcgcaagggcaagcgaatc

SEQ ID NO: 44813 - DNA, 20 bp, Haemophilus actinemycetemcomitans
gtttagccctggtgcccgaa

SEQ ID NO: 44814 - DNA, 20 bp, Corynebacterium glucuronolyticum
ggtacagtgcgtgtgcgaca

SEQ ID NO: 44815 - DNA, 20 bp, Ignavigranum ruoffiae
atgttaagtgttggggggct

SEQ ID NO: 44816 - DNA, 20 bp, Clostridium clostridiiforme
tgcctcacactgggggataa

SEQ ID NO: 44817 - DNA, 20 bp, Pasteurella aerogenes
aggaaggcggttagtttaat

SEQ ID NO: 44818 - DNA, 20 bp, Prevotella bivia
gacatctgtgaaggtgctgc

SEQ ID NO: 44819 - DNA, 20 bp, Bacteroides stercoris
gacgtggtgctaatcccgaa

SEQ ID NO: 44820 - DNA, 20 bp, Streptococcus equinus
ccgcataacagcatttaaca

SEQ ID NO: 44821 - DNA, 20 bp, Corynebacterium afermentans
gaaattctttccagctactg

SEQ ID NO: 44822 - DNA, 20 bp, Peptostreptococcus anaerobius
cgtagatatatcaaagtgtt

SEQ ID NO: 44823 - DNA, 20 bp, Eggerthella lenta
tggggtcgcggcccattagg

SEQ ID NO: 44824 - DNA, 20 bp, Clostridium clostridiiforme
aaggcggggcaggtaactgg

SEQ ID NO: 44825 - DNA, 20 bp, Anaerococcus prevotii
gggcttgacatactgaggac

SEQ ID NO: 44826 - DNA, 20 bp, Anaerococcus prevotii
taagatggattagcggcgga

SEQ ID NO: 44827 - DNA, 20 bp, Arthrobacter globiformis
tggaaagatttattggtctt

SEQ ID NO: 44828 - DNA, 20 bp, Facklamia sourekii
aggtgaaatcctacgggaca

SEQ ID NO: 44829 - DNA, 20 bp, Haemophilus haemolyticus
tggcgaaactgcgaggtgga

SEQ ID NO: 44830 - DNA, 20 bp, Bacillus sp
tttctctccgcatggagaga

SEQ ID NO: 44831 - DNA, 20 bp, Clostridium septicum
gaggggagtttcttcggaaa

SEQ ID NO: 44832 - DNA, 20 bp, Fusobacterium varium
cctcttcggaggaacttggt

SEQ ID NO: 44833 - DNA, 20 bp, Propionibacterium freudenreichii
tgacatgtactggaagcgtt

SEQ ID NO: 44834 - DNA, 20 bp, Corynebacterium group F
ggtacagcgcgtttgctacc

SEQ ID NO: 44835 - DNA, 20 bp, Neisseria elongata
tttgttagggaagaaaaagg

SEQ ID NO: 44836 - DNA, 20 bp, Corynebacterium xerosis
tcctttcaccatcgacgaag

SEQ ID NO: 44837 - DNA, 20 bp, Neisseria flavescens
tatcgacagctgatgacggt

SEQ ID NO: 44838 - DNA, 20 bp, Campylobacter concisus
caccggaccgggccagagat

SEQ ID NO: 44839 - DNA, 20 bp, Helcococcus kunzii
agtagccggattgagaggtt

SEQ ID NO: 44840 - DNA, 20 bp, Clostridium innocuum
gtgaacatggatggacctgc

SEQ ID NO: 44841 - DNA, 20 bp, Veillonella atypica
aatctagagtatcggagagg

SEQ ID NO: 44842 - DNA, 20 bp, Bacteroides distasonis
catagatatcacgcagaacc

SEQ ID NO: 44843 - DNA, 20 bp, Gemella bergeri
gatcagtgctgcagcaaacg

SEQ ID NO: 44844 - DNA, 20 bp, Rothia mucilaginosa
cgcatcagagatggtgtttc

SEQ ID NO: 44845 - DNA, 20 bp, Sporosarcina pasteurii
tacctttcccttcggggaca

SEQ ID NO: 44846 - DNA, 20 bp, Neisseria flavescens
aaggctgttgctaatatcga

SEQ ID NO: 44847 - DNA, 20 bp, Comamonas terrigena
tggctaataccgcatgagat

SEQ ID NO: 44848 - DNA, 20 bp, Peptostreptococcus anaerobius
gtctttcaagtcggtggtta

SEQ ID NO: 44849 - DNA, 20 bp, Enterococcus cecorum
ctctagcgagactgccgcag

SEQ ID NO: 44850 - DNA, 20 bp, Clostridium innocuum
ggtagctaaaaccggatagg

SEQ ID NO: 44851 - DNA, 20 bp, Bacillus schlegellii
gtaaacccctgttgtcgggg

SEQ ID NO: 44852 - DNA, 20 bp, Aerococcus christensenii
gtaaagggggcgcaggctgc

SEQ ID NO: 44853 - DNA, 20 bp, Leuconostoc argentinum
gatacaaagttgaaaggcgc

SEQ ID NO: 44854 - DNA, 20 bp, Helcococcus kunzii
tggtctgaacaaagcgcagc

SEQ ID NO: 44855 - DNA, 20 bp, Aerococcus viridans
acagatgaagtgcttgcact

SEQ ID NO: 44856 - DNA, 20 bp, Propionibacterium freudenreichii
gcccttgacttcggtatagc

SEQ ID NO: 44857 - DNA, 20 bp, Anaerococcus prevotii
aagtctttcccagttcggat

SEQ ID NO: 44858 - DNA, 20 bp, Facklamia ignava
tgttatcagagaagaatagc

SEQ ID NO: 44859 - DNA, 20 bp, Corynebacterium jeikeium
cttgcaaggggtactcgagt

SEQ ID NO: 44860 - DNA, 20 bp, Anaerococcus tetradius
agctcaactatataaagctt

SEQ ID NO: 44861 - DNA, 20 bp, Corynebacterium group F
ggacaactttttggatattg

SEQ ID NO: 44862 - DNA, 20 bp, Providencia stuartii
ctttgtgatccatgactggg

SEQ ID NO: 44863 - DNA, 20 bp, Comamonas terrigena
ttcgggttaataccctggag

SEQ ID NO: 44864 - DNA, 20 bp, Suttonella indologenes
aacacttacgagtcaaagcg

SEQ ID NO: 44865 - DNA, 20 bp, Bacteroides fragilis
gtgcagtatgtatactgttt

SEQ ID NO: 44866 - DNA, 20 bp, Moraxella lacunata
tttaagtcgggaactctaag

SEQ ID NO: 44867 - DNA, 20 bp, Cardiobacterium hominis
gcagctttctgggtcgatac

SEQ ID NO: 44868 - DNA, 20 bp, Neisseria polysaccharea
ttgattgcttggtagcgtag

SEQ ID NO: 44869 - DNA, 20 bp, Rothia dentocariosa
gaagcggtgcttgcaccgtg

SEQ ID NO: 44870 - DNA, 20 bp, Corynebacterium mycetoides
gaaaggccgaagcttgcttt

SEQ ID NO: 44871 - DNA, 20 bp, Facklamia hominis
cgaaggaaagacggcttcgg

SEQ ID NO: 44872 - DNA, 20 bp, Facklamia sourekii
gacggcttttgctgtcacta

SEQ ID NO: 44873 - DNA, 20 bp, Leptotrichia buccalis
ccaaggcggacgggtgagta

SEQ ID NO: 44874 - DNA, 20 bp, Leptotrichia buccalis
gaatctgtgcttgcacagcc

SEQ ID NO: 44875 - DNA, 20 bp, Bacteroides thetaiotaomicron
catactcggggatagccttt

SEQ ID NO: 44876 - DNA, 20 bp, Prevotella melaninogenica
aatgtagacgctcaacgtct

SEQ ID NO: 44877 - DNA, 20 bp, Prevotella melaninogenica
ctgccgaaaggcagactaat

SEQ ID NO: 44878 - DNA, 20 bp, Clostridium glycolicum
cacttcggtgaagagcggcg

SEQ ID NO: 44879 - DNA, 20 bp, Staphylococcus muscae
cgcactagagatagtgtttt

SEQ ID NO: 44880 - DNA, 20 bp, Clostridium clostridiiforme
atgctaggtgttggggggca

SEQ ID NO: 44881 - DNA, 20 bp, Leuconostoc lactis
aaaggctcaccaagaccgtg

SEQ ID NO: 44882 - DNA, 20 bp, Comamonas testosteroni
ggaactgccattgtgactgc

SEQ ID NO: 44883 - DNA, 20 bp, Prevotella bivia
ggacatctgtgaaggtgctg

SEQ ID NO: 44884 - DNA, 20 bp, Corynebacterium propinquum
gtctgtgaaattccacagct

SEQ ID NO: 44885 - DNA, 20 bp, Bacteroides uniformis
tgtggagacatgtcagccgc

SEQ ID NO: 44886 - DNA, 20 bp, Paenibacillus amylolyticus
ctcctggggagataatgaaa

SEQ ID NO: 44887 - DNA, 20 bp, Leptotrichia buccalis
ctttaaagccggtccaagtt

SEQ ID NO: 44888 - DNA, 20 bp, Bacteroides thetaiotaomicron
tggtcttgttattaaagaat

SEQ ID NO: 44889 - DNA, 20 bp, Streptococcus constellatus
ataccgcataagaacattta

SEQ ID NO: 44890 - DNA, 20 bp, Anaerococcus prevotii
tccggcggtctaagatggac

SEQ ID NO: 44891 - DNA, 20 bp, Propionibacterium avidum
tcggcggttttggatggact

SEQ ID NO: 44892 - DNA, 20 bp, Moraxella lacunata
gagcgtaggtggtcatttaa

SEQ ID NO: 44893 - DNA, 20 bp, Streptococcus equi
ctattcttagagataagaag

SEQ ID NO: 44894 - DNA, 20 bp, Facklamia hominis
tgttagcggagtgacggtat

SEQ ID NO: 44895 - DNA, 20 bp, Arcanobacterium bernardiae
cggatattctgctttcatcg

SEQ ID NO: 44896 - DNA, 20 bp, Streptococcus infantarius
ccgatgccattcctagagat

SEQ ID NO: 44897 - DNA, 20 bp, Propionibacterium freudenreichii
agcgttcagagatgggcgtg

SEQ ID NO: 44898 - DNA, 20 bp, Oligella urethralis
cttaaggtattagcctaaga

SEQ ID NO: 44899 - DNA, 20 bp, Leuconostoc pseudomesenteroides
aagttaaaaggcgctttggc

SEQ ID NO: 44900 - DNA, 20 bp, Brevibacillus choshinensis
agaccgcatggtctgaaagg

SEQ ID NO: 44901 - DNA, 20 bp, Campylobacter rectus
ttcttgggaaagaattatga

SEQ ID NO: 44902 - DNA, 20 bp, Campylobacter rectus
aactccttttcttgggaaag

SEQ ID NO: 44903 - DNA, 20 bp, Porphyromonas endodontalis
gtcagtggtgaaaagctgca

SEQ ID NO: 44904 - DNA, 20 bp, Clostridium limosum
cggggtttcaatacttcggt

SEQ ID NO: 44905 - DNA, 20 bp, Aerococcus viridans
cgcatggaagaagattgaaa

SEQ ID NO: 44906 - DNA, 20 bp, Corynebacterium glucuronolyticum
cccagcttgctggggtgctc

SEQ ID NO: 44907 - DNA, 20 bp, Fusobacterium varium
agagatgttttcgtgcctct

SEQ ID NO: 44908 - DNA, 20 bp, Eggerthella lenta
aattcgacggtacctgcaga

SEQ ID NO: 44909 - DNA, 20 bp, Bacillus azotoformans
gataaaagatggtttcggct

SEQ ID NO: 44910 - DNA, 20 bp, Bacteroides fragilis
tatactgttttgtatgtatt

SEQ ID NO: 44911 - DNA, 20 bp, Oligella ureolytica
ctcaacgaagaaaagtctta

SEQ ID NO: 44912 - DNA, 20 bp, Anaerococcus prevotii
gatattaaaaagaataccgg

SEQ ID NO: 44913 - DNA, 20 bp, Bacteroides merdae
attggtcaatggccgagagg

SEQ ID NO: 44914 - DNA, 20 bp, Acinetobacter genospecies 3
gagcggagagaggtagcttg

SEQ ID NO: 44915 - DNA, 20 bp, Alicyclobacillus acidocaldarius
gtatccggcattagcgcccg

SEQ ID NO: 44916 - DNA, 20 bp, Bacteroides stercoris
gtggctttttgtatgtaccg

SEQ ID NO: 44917 - DNA, 20 bp, Helcococcus kunzii
acctcgtgagagcaagcgaa

SEQ ID NO: 44918 - DNA, 20 bp, Propionibacterium freudenreichii
aggaacgtgcccttgacttc

SEQ ID NO: 44919 - DNA, 20 bp, Clostridium tetani
gtccaaccttctgtgccgca

SEQ ID NO: 44920 - DNA, 20 bp, Streptococcus ratti
gatgctattcttagagatag

SEQ ID NO: 44921 - DNA, 20 bp, Prevotella melaninogenica
gttggtacctggtatcagcg

SEQ ID NO: 44922 - DNA, 20 bp, Alcaligenes faecalis
cagcgcgagagagcttgctc

SEQ ID NO: 44923 - DNA, 20 bp, Prevotella melaninogenica
acgcacaacgttggcggaat

SEQ ID NO: 44924 - DNA, 20 bp, Bacillus lentus
cagggcggtcaggagatgtc

SEQ ID NO: 44925 - DNA, 20 bp, Paenibacillus amylolyticus
gctcaaccttggttcgcact

SEQ ID NO: 44926 - DNA, 20 bp, Streptococcus gordonii
tgcatgataattaattgaaa

SEQ ID NO: 44927 - DNA, 20 bp, Enterococcus raffinosus
ccgcatggtttctatttgaa

SEQ ID NO: 44928 - DNA, 20 bp, Turicella otitidis
ataggagccatttttagtgt

SEQ ID NO: 44929 - DNA, 20 bp, Brevibacillus agri
aagaaaagatggcttttcgc

SEQ ID NO: 44930 - DNA, 20 bp, Clostridium tetani
tttcgcatgaaactttaacc

SEQ ID NO: 44931 - DNA, 20 bp, Shewanella algae
cctatccttacttgccagcg

SEQ ID NO: 44932 - DNA, 20 bp, Bacillus schlegellii
gagtcgggggcgcccgaagg

SEQ ID NO: 44933 - DNA, 20 bp, Peptoniphilus indolicus
attagcggtcaaagatggac

SEQ ID NO: 44934 - DNA, 20 bp, Aneurinibacillus aneurinilyticus
cgcatggtctgaaagagaaa

SEQ ID NO: 44935 - DNA, 20 bp, Anaerococcus prevotii
gtaagtggaatttttagtgt

SEQ ID NO: 44936 - DNA, 20 bp, Paenibacillus thiaminolyticus
aacgctatggagagtaactg

SEQ ID NO: 44937 - DNA, 20 bp, Leuconostoc argentinum
tggttaacttgagtgttgta

SEQ ID NO: 44938 - DNA, 20 bp, Propionibacterium freudenreichii
acttcggtatagctccagga

SEQ ID NO: 44939 - DNA, 20 bp, Brevibacillus borstelensis
gtggcgcaagctaccactta

SEQ ID NO: 44940 - DNA, 20 bp, Peptoniphilus indolicus
tgtcataacgatcaaagtga

SEQ ID NO: 44941 - DNA, 20 bp, Moraxella bovis
gccttcgggagcttggatac

SEQ ID NO: 44942 - DNA, 20 bp, Aerococcus viridans
taatatcttcttccgcatgg

SEQ ID NO: 44943 - DNA, 20 bp, Empedobacter brevis
gtagctgaaggtaccagaag

SEQ ID NO: 44944 - DNA, 20 bp, Gemella haemolysans
aggacacaagagattgtgtt

SEQ ID NO: 44945 - DNA, 20 bp, Streptococcus thermophilus
gtcatttatttgaaaggggc

SEQ ID NO: 44946 - DNA, 20 bp, Actinomyces bovis
tatgcgcgcaagcgtaaaac

SEQ ID NO: 44947 - DNA, 20 bp, Capnocytophaga gingivalis
ggcaggggactaacagacaa

SEQ ID NO: 44948 - DNA, 20 bp, Brevibacillus parabrevis
tttttggattgcatgatccg

SEQ ID NO: 44949 - DNA, 20 bp, Alcaligenes faecalis
tgacatgtctggaaagccga

SEQ ID NO: 44950 - DNA, 20 bp, Weeksella virosa
agtggtgaaatcctatcgct

SEQ ID NO: 44951 - DNA, 20 bp, Virgibacillus pantothenticus
tcgggggtgacgcttgtgga

SEQ ID NO: 44952 - DNA, 20 bp, Brevibacillus choshinensis
ctctcttcggagcagcggtg

SEQ ID NO: 44953 - DNA, 20 bp, Facklamia ignava
ggtacagcgagaagcgacgt

SEQ ID NO: 44954 - DNA, 20 bp, Bacillus coagulans
gacatcctctgacctccctg

SEQ ID NO: 44955 - DNA, 20 bp, Propionibacterium propionicus
cggaaacgtctagagatagg

SEQ ID NO: 44956 - DNA, 20 bp, Pasteurella trehalosi
taatagacaaagcaattgac

SEQ ID NO: 44957 - DNA, 20 bp, Eggerthella lenta
tgggaggctcgagttcggta

SEQ ID NO: 44958 - DNA, 20 bp, Streptococcus gordonii
cagtttataccgtagcttgc

SEQ ID NO: 44959 - DNA, 20 bp, Actinomyces bovis
gtctttagttaccagcatta

SEQ ID NO: 44960 - DNA, 20 bp, Neisseria meningitidis
tcgagtcacccagttcagaa

SEQ ID NO: 44961 - DNA, 20 bp, Streptococcus gordonii
accatagactgtgagttgcg

SEQ ID NO: 44962 - DNA, 20 bp, Corynebacterium group F
ggtcggtacagcgcgtttgc

SEQ ID NO: 44963 - DNA, 20 bp, Clostridium bifermentans
tgtatcaaagctccggcggt

SEQ ID NO: 44964 - DNA, 20 bp, Tissierella praeacuta
tcgggtacaggggacacagg

SEQ ID NO: 44965 - DNA, 20 bp, Aerococcus viridans
agcgaacagatgaagtgctt

SEQ ID NO: 44966 - DNA, 20 bp, Peptostreptococcus anaerobius
gcaaggaggaagtcgtcgaa

SEQ ID NO: 44967 - DNA, 20 bp, Bacillus sp
atttgcttggcctcacggct

SEQ ID NO: 44968 - DNA, 20 bp, Eggerthella lenta
actgggaggctcgagttcgg

SEQ ID NO: 44969 - DNA, 20 bp, Clostridium clostridiiforme
tgaagtgaaaacccagggct

SEQ ID NO: 44970 - DNA, 20 bp, Burkholderia multivorans
ggctctaatacagtcggggg

SEQ ID NO: 44971 - DNA, 20 bp, Comamonas testosteroni
aaagcctggggctaatatcc

SEQ ID NO: 44972 - DNA, 20 bp, Propionibacterium avidum
aaggcccctttgggggtact

SEQ ID NO: 44973 - DNA, 20 bp, Bacillus lentus
aatgctggcaactagaacca

SEQ ID NO: 44974 - DNA, 20 bp, Bacteroides forsythus
aaaacaggggttccgcatgg

SEQ ID NO: 44975 - DNA, 20 bp, Propionibacterium freudenreichii
ggaagcgttcagagatgggc

SEQ ID NO: 44976 - DNA, 20 bp, Bacteroides capilosus
aaagccatcccagttcggat

SEQ ID NO: 44977 - DNA, 20 bp, Ralstonia paucula
aagaaattgctctggctaat

SEQ ID NO: 44978 - DNA, 20 bp, Bacteroides uniformis
gcgacgtgatgctaatccct

SEQ ID NO: 44979 - DNA, 20 bp, Corynebacterium accolens
ctttctacgactttcgtgcc

SEQ ID NO: 44980 - DNA, 20 bp, Bacteroides fragilis
gtcagtgagcaatcaccgct

SEQ ID NO: 44981 - DNA, 20 bp, Anaerococcus tetradius
tcaactatataaagctttta

SEQ ID NO: 44982 - DNA, 20 bp, Moraxella lacunata
gttgggtctcttgaagactt

SEQ ID NO: 44983 - DNA, 20 bp, Serratia marcescens
tacgttcatcaattgacgtt

SEQ ID NO: 44984 - DNA, 20 bp, Comamonas testosteroni
ttgtgctactagagcggctg

SEQ ID NO: 44985 - DNA, 20 bp, Corynebacterium propinquum
cgcttaaagctggtcttagt

SEQ ID NO: 44986 - DNA, 20 bp, Bacteroides fragilis
ggaaacatgtcagtgagcaa

SEQ ID NO: 44987 - DNA, 20 bp, Fusobacterium nucleatum
tttcagtgtcccttcgggga

SEQ ID NO: 44988 - DNA, 20 bp, Alicyclobacillus acidocaldarius
cacgtagttagccgggggct

SEQ ID NO: 44989 - DNA, 20 bp, Facklamia ignava
cgtggagttgcattggaaac

SEQ ID NO: 44990 - DNA, 20 bp, Helcococcus ovis
cccgaagccgtcgagctaac

SEQ ID NO: 44991 - DNA, 20 bp, Anaerococcus tetradius
ggtatggaagggaaagtgga

SEQ ID NO: 44992 - DNA, 20 bp, Bacillus pumilus
accggatagttccttgaacc

SEQ ID NO: 44993 - DNA, 20 bp, Prevotella intermedia
cgcctggcgttagcggctaa

SEQ ID NO: 44994 - DNA, 20 bp, Clostridium ramosum
ctgcaactgacgctcagtcc

SEQ ID NO: 44995 - DNA, 20 bp, Bacteroides vulgatus
gaggactctgacaagactgc

SEQ ID NO: 44996 - DNA, 20 bp, Peptoniphilus indolicus
taacctgcctttgacacggg

SEQ ID NO: 44997 - DNA, 20 bp, Ochrobactrum intermedium
acgtaggcgggctaataagt

SEQ ID NO: 44998 - DNA, 20 bp, Moraxella osloensis
atacccattagattagacgt

SEQ ID NO: 44999 - DNA, 20 bp, Clostridium cadaveris
ggtttcgatacctctgtgcc

SEQ ID NO: 45000 - DNA, 20 bp, Corynebacterium glucuronolyticum
tgggctagagatagttcgtc

SEQ ID NO: 45001 - DNA, 20 bp, Streptococcus parasanguinis
aagcttggtgcttgcaccga

SEQ ID NO: 45002 - DNA, 20 bp, Actinomyces bovis
ggagtatgcgcgcaagcgta

SEQ ID NO: 45003 - DNA, 20 bp, Ignavigranum ruoffiae
gcgacctcgtgagagcaagc

SEQ ID NO: 45004 - DNA, 20 bp, Neisseria meningitidis
tcccctgctttctctctcaa

SEQ ID NO: 45005 - DNA, 20 bp, Bacillus lentus
attcgctcatgcgtcgccgc

SEQ ID NO: 45006 - DNA, 20 bp, Brevibacillus choshinensis
agcggaccaatgaagagctt

SEQ ID NO: 45007 - DNA, 20 bp, Alcaligenes faecalis
aagccgaagagatttggccg

SEQ ID NO: 45008 - DNA, 20 bp, Facklamia sourekii
aagtgttggggggcttccac

SEQ ID NO: 45009 - DNA, 20 bp, Prevotella intermedia
ggaaacggcattatgtgctt

SEQ ID NO: 45010 - DNA, 20 bp, Clostridium glycolicum
tagtaagctcttgaaactgg

SEQ ID NO: 45011 - DNA, 20 bp, Veillonella parvula
catacgatctaacctcggca

SEQ ID NO: 45012 - DNA, 20 bp, Prevotella melaninogenica
cgtgtgattgtttgcaggta

SEQ ID NO: 45013 - DNA, 20 bp, Lactobacillus acidophilus
aaccaacagattcacttcgg

SEQ ID NO: 45014 - DNA, 20 bp, Eikenella corrodens
cactttttgctgacggtacc

SEQ ID NO: 45015 - DNA, 20 bp, Haemophilus segnis
tccagagaacattccagaga

SEQ ID NO: 45016 - DNA, 20 bp, Bacteroides vulgatus
cgagtggatgccaatcccaa

SEQ ID NO: 45017 - DNA, 20 bp, Staphylococcus condimenti
ctaatgccggataatatgcg

SEQ ID NO: 45018 - DNA, 20 bp, Staphylococcus capitis
ggacagctgtttagtgtcag

SEQ ID NO: 45019 - DNA, 20 bp, Arthrobacter globiformis
tggaccggaccgccgcagaa

SEQ ID NO: 45020 - DNA, 20 bp, Leptotrichia buccalis
atgtgcaggaatgccgatga

SEQ ID NO: 45021 - DNA, 20 bp, Streptococcus acidominimus
aacatttaaaaggtgcaact

SEQ ID NO: 45022 - DNA, 20 bp, Bacteroides thetaiotaomicron
ttaaattgcatttgaatatt

SEQ ID NO: 45023 - DNA, 20 bp, Leuconostoc pseudomesenteroides
cagacggttaattaagtctg

SEQ ID NO: 45024 - DNA, 20 bp, Facklamia languida
tgaaggaaagacggcttcgg

SEQ ID NO: 45025 - DNA, 20 bp, Pseudoramibacter alactolyticus
ccttcgggtgaaattagaac

SEQ ID NO: 45026 - DNA, 20 bp, Actinomyces naeslundii
ttccgggtcttccgcgccgt

SEQ ID NO: 45027 - DNA, 20 bp, Leuconostoc fallax
ctcaactgtggaatggcttt

SEQ ID NO: 45028 - DNA, 20 bp, Tissierella praeacuta
agatttaagtcaaagcgtaa

SEQ ID NO: 45029 - DNA, 20 bp, Brevibacillus choshinensis
tcttcggcggttagcggcgg

SEQ ID NO: 45030 - DNA, 20 bp, Tissierella praeacuta
cctttagttgctaacagata

SEQ ID NO: 45031 - DNA, 20 bp, Bacteroides uniformis
acttagcttgctaagtttga

SEQ ID NO: 45032 - DNA, 20 bp, Pasteurella aerogenes
aaggcggttagtttaatagg

SEQ ID NO: 45033 - DNA, 20 bp, Leuconostoc pseudomesenteroides
taaccttttaggaaggagcc

SEQ ID NO: 45034 - DNA, 20 bp, Ochrobactrum intermedium
cagccatgccgcgtgagtga

SEQ ID NO: 45035 - DNA, 20 bp, Clostridium paraputrificum
ccggtacaacgagatgcaat

SEQ ID NO: 45036 - DNA, 20 bp, Gemella haemolysans
atactgtgaggacacaagag

SEQ ID NO: 45037 - DNA, 20 bp, Prevotella melaninogenica
gccggagattaagtgtgttg

SEQ ID NO: 45038 - DNA, 20 bp, Paenibacillus larvae
agacggggcaacctgtcact

SEQ ID NO: 45039 - DNA, 20 bp, Actinomyces odontolyticus
agatgtggtggcatttagtt

SEQ ID NO: 45040 - DNA, 20 bp, Bacteroides capilosus
tccgaaaggactgctaatac

SEQ ID NO: 45041 - DNA, 20 bp, Clostridium clostridiiforme
tttgaaattgacttagcggc

SEQ ID NO: 45042 - DNA, 20 bp, Staphylococcus carnosus
gctaatgccggataatatgc

SEQ ID NO: 45043 - DNA, 20 bp, Actinomyces odontolyticus
ggcactgcagagatgtggtg

SEQ ID NO: 45044 - DNA, 20 bp, Prevotella disiens
aacctgccctttacttgggg

SEQ ID NO: 45045 - DNA, 20 bp, Atopobium parvulum
aagcaccttcgggtgtgtat

SEQ ID NO: 45046 - DNA, 20 bp, Campylobacter rectus
gtatactagttgttgcttcg

SEQ ID NO: 45047 - DNA, 20 bp, Anaerococcus prevotii
taaaaagaataccggtggcg

SEQ ID NO: 45048 - DNA, 20 bp, Facklamia sourekii
cgactttctggtctgacact

SEQ ID NO: 45049 - DNA, 20 bp, Clostridium cadaveris
agcaccttcgggtgtgaact

SEQ ID NO: 45050 - DNA, 20 bp, Porphyromonas endodontalis
aactgtagtcttgccgttga

SEQ ID NO: 45051 - DNA, 20 bp, Enterobacter sakazakii
actggtcagcttgagtctcg

SEQ ID NO: 45052 - DNA, 20 bp, Paenibacillus apiarius
aaaactgcatgacttgagta

SEQ ID NO: 45053 - DNA, 20 bp, Leuconostoc citreum
tgctaaaatagggaatgatt

SEQ ID NO: 45054 - DNA, 20 bp, Clostridium innocuum
caaaaagacttagtggcgaa

SEQ ID NO: 45055 - DNA, 20 bp, Dermacoccus nishinomiyaensis
gtggaaagtttttgtggtgg

SEQ ID NO: 45056 - DNA, 20 bp, Oligella urethralis
aagacttttcttcgttgaga

SEQ ID NO: 45057 - DNA, 20 bp, Prevotella intermedia
cgtatgcggaattcatggtg

SEQ ID NO: 45058 - DNA, 20 bp, Pediococcus dextrinicus
cttgacatctagcgccaatc

SEQ ID NO: 45059 - DNA, 20 bp, Brevibacillus choshinensis
tccttcgggggctagcggcg

SEQ ID NO: 45060 - DNA, 20 bp, Bacteroides vulgatus
cgagtggatgccaatcccca

SEQ ID NO: 45061 - DNA, 20 bp, Oligella urethralis
caactaccgtcagcatctta

SEQ ID NO: 45062 - DNA, 20 bp, Bacillus coagulans
gctgttcccctgaggagtgg

SEQ ID NO: 45063 - DNA, 20 bp, Kytococcus sedentarius
tgacatgcaccggatcgcct

SEQ ID NO: 45064 - DNA, 20 bp, Neisseria meningitidis
ttctctctcaagacgtatgc

SEQ ID NO: 45065 - DNA, 20 bp, Streptococcus porcinus
ttctgaccggcctagagata

SEQ ID NO: 45066 - DNA, 20 bp, Globicatella sanguinis
atatcttagagataagagaa

SEQ ID NO: 45067 - DNA, 20 bp, Streptococcus thoraltensis
cggtagcttatcagaaaggg

SEQ ID NO: 45068 - DNA, 20 bp, Propionibacterium avidum
gcaggggcgaagcttttgtg

SEQ ID NO: 45069 - DNA, 20 bp, Weeksella virosa
gcggatcaataagtcagtgg

SEQ ID NO: 45070 - DNA, 20 bp, Brevibacterium linens
atgcgagaccgcgaggtttt

SEQ ID NO: 45071 - DNA, 20 bp, Corynebacterium amycolatum
gaccatggtgtggatgctgt

SEQ ID NO: 45072 - DNA, 20 bp, Clostridium subterminale
attaataccgcataatgtat

SEQ ID NO: 45073 - DNA, 20 bp, Facklamia ignava
aacttgttcctttcaacgcg

SEQ ID NO: 45074 - DNA, 20 bp, Leptotrichia buccalis
ccgtgccgaagctaatgcga

SEQ ID NO: 45075 - DNA, 20 bp, Alicyclobacillus acidocaldarius
gtctcgcatggggctttcca

SEQ ID NO: 45076 - DNA, 20 bp, Clostridium ramosum
gcaactgacgctcagtcccg

SEQ ID NO: 45077 - DNA, 20 bp, Campylobacter concisus
cagtacaatgggttgcgatg

SEQ ID NO: 45078 - DNA, 20 bp, Campylobacter curvus
cgaagcccaaataccaaacc

SEQ ID NO: 45079 - DNA, 20 bp, Clostridium limosum
atgcgtaggcggatacttaa

SEQ ID NO: 45080 - DNA, 20 bp, Prevotella bivia
cccataactaagggataacc

SEQ ID NO: 45081 - DNA, 20 bp, Gemella haemolysans
cacaagagattgtgttgttc

SEQ ID NO: 45082 - DNA, 20 bp, Enterococcus raffinosus
gtttctatttgaaaggcgct

SEQ ID NO: 45083 - DNA, 20 bp, Microbacterium hominis
aagtcgaacgggtgaaggcc

SEQ ID NO: 45084 - DNA, 20 bp, Leuconostoc pseudomesenteroides
gcatgacacaaagttaaaag

SEQ ID NO: 45085 - DNA, 20 bp, Gemella haemolysans
gaagtttttctggtgcttgc

SEQ ID NO: 45086 - DNA, 20 bp, Bacteroides thetaiotaomicron
tatatgggaataaagttttc

SEQ ID NO: 45087 - DNA, 20 bp, Fusobacterium mortiferum
taagaaattagcagagatgc

SEQ ID NO: 45088 - DNA, 20 bp, Prevotella melaninogenica
cgcacaacgttggcggaatt

SEQ ID NO: 45089 - DNA, 20 bp, Anaerococcus tetradius
aggcgactttctggccataa

SEQ ID NO: 45090 - DNA, 20 bp, Paenibacillus macerans
tgcttgcactcctgagagtt

SEQ ID NO: 45091 - DNA, 20 bp, Veillonella atypica
tcagtctgtcttaaaagttc

SEQ ID NO: 45092 - DNA, 20 bp, Peptostreptococcus anaerobius
aagttctgttgcaggggaag

SEQ ID NO: 45093 - DNA, 20 bp, Paenibacillus validus
ggggcaacctgtggcttacg

SEQ ID NO: 45094 - DNA, 20 bp, Anaerococcus prevotii
tgatattaagcaaacctcaa

SEQ ID NO: 45095 - DNA, 20 bp, Actinomyces naeslundii
ccttcttctggataaccgca

SEQ ID NO: 45096 - DNA, 20 bp, Pseudoramibacter alactolyticus
acccgaagcctgtgagagaa

SEQ ID NO: 45097 - DNA, 20 bp, Bacteroides uniformis
agtacagtagaggcaggcgg

SEQ ID NO: 45098 - DNA, 20 bp, Photobacterium damselae
cggcagcgacttaactgaac

SEQ ID NO: 45099 - DNA, 20 bp, Vibrio cholerae
gtattaacttaaccaccttc

SEQ ID NO: 45100 - DNA, 20 bp, Kingella denitrificans
gttagggaagaaaagggaag

SEQ ID NO: 45101 - DNA, 20 bp, Bacillus cereus
acattttgaactgcatggtt

SEQ ID NO: 45102 - DNA, 20 bp, Prevotella loescheii
caatccccgatggcgaccgg

SEQ ID NO: 45103 - DNA, 20 bp, Morganella morganii
cttcgggcctcgcaccatca

SEQ ID NO: 45104 - DNA, 20 bp, Streptococcus thoraltensis
cgagctggtgacagtaagct

SEQ ID NO: 45105 - DNA, 20 bp, Fusobacterium nucleatum
ggacaacatttagaaatgaa

SEQ ID NO: 45106 - DNA, 20 bp, Gemella sanguinis
atgtttaaaagttggtttcg

SEQ ID NO: 45107 - DNA, 20 bp, Citrobacter sedlakii
ggaggaagggattgtggtta

SEQ ID NO: 45108 - DNA, 20 bp, Bacteroides capilosus
aatcggaattccgtgtgtag

SEQ ID NO: 45109 - DNA, 20 bp, Bacillus pumilus
aaggatgaaagacggtttcg

SEQ ID NO: 45110 - DNA, 20 bp, Aerococcus viridans
ggcgacattctggtctgtta

SEQ ID NO: 45111 - DNA, 20 bp, Brevibacillus brevis
tgaggaaaagctgaaagtcg

SEQ ID NO: 45112 - DNA, 20 bp, Moraxella  catarrhalis
aagttaggaagcttgcttct

SEQ ID NO: 45113 - DNA, 20 bp, Prevotella oralis
tatccaaccttcccattact

SEQ ID NO: 45114 - DNA, 20 bp, Aerococcus viridans
acttatagatgaccttgcgg

SEQ ID NO: 45115 - DNA, 20 bp, Alicyclobacillus acidocaldarius
tcgcctccctttgttccgcc

SEQ ID NO: 45116 - DNA, 20 bp, Bacteroides thetaiotaomicron
actggagatggcgaccggcg

SEQ ID NO: 45117 - DNA, 20 bp, Salmonella enteritidis
aatccagagatggatttgtg

SEQ ID NO: 45118 - DNA, 20 bp, Anaerococcus prevotii
ggcgacttactgggctcatt

SEQ ID NO: 45119 - DNA, 20 bp, Plesiomonas shigelloides
cctcatgctatcggatgaac

SEQ ID NO: 45120 - DNA, 20 bp, Corynebacterium group F
tcgtttgtgtaagtccacag

SEQ ID NO: 45121 - DNA, 20 bp, Moraxella osloensis
gcgagtgtaggtggctcatt

SEQ ID NO: 45122 - DNA, 20 bp, Brochothrix campestris
aaatcgatgctaataccgaa

SEQ ID NO: 45123 - DNA, 20 bp, Brochothrix campestris
tcaagtgaaagacggtttcg

SEQ ID NO: 45124 - DNA, 20 bp, Bacteroides stercoris
atcccgaaagcctctctcag

SEQ ID NO: 45125 - DNA, 20 bp, Bacillus lentus
ctgtctccagggcggtcagg

SEQ ID NO: 45126 - DNA, 20 bp, Prevotella oris
cagcgcgaactggtccactt

SEQ ID NO: 45127 - DNA, 20 bp, Prevotella intermedia
acagttccaaaagcttacta

SEQ ID NO: 45128 - DNA, 20 bp, Anaerobiospirillum succiniciproducens
cccttacggtcagggctaca

SEQ ID NO: 45129 - DNA, 20 bp, Brochothrix campestris
tgctgaacatcataagatgt

SEQ ID NO: 45130 - DNA, 20 bp, Cardiobacterium hominis
gagccaatctgagaaagccg

SEQ ID NO: 45131 - DNA, 20 bp, Propionibacterium freudenreichii
ttggctggtacacaggtggt

SEQ ID NO: 45132 - DNA, 20 bp, Actinomyces turicensis
ttggtacagagtgttgcgat

SEQ ID NO: 45133 - DNA, 20 bp, Streptococcus agalactiae
ttaacacatgttagttattt

SEQ ID NO: 45134 - DNA, 20 bp, Vibrio hollisae
gccctgacgagggggataac

SEQ ID NO: 45135 - DNA, 20 bp, Arthrobacter globiformis
ggaaagatttattggtcttg

SEQ ID NO: 45136 - DNA, 20 bp, Paenibacillus apiarius
gggtgtttaaacctagggct

SEQ ID NO: 45137 - DNA, 20 bp, Pseudoramibacter alactolyticus
gtgaaattagaactggaaag

SEQ ID NO: 45138 - DNA, 20 bp, Capnocytophaga ochracea
gccattagttgctaacgagt

SEQ ID NO: 45139 - DNA, 20 bp, Anaerococcus prevotii
ttcagttaagtctggcaacg

SEQ ID NO: 45140 - DNA, 20 bp, Paenibacillus azotofixans
aaggagtgacggtacctgag

SEQ ID NO: 45141 - DNA, 20 bp, Micrococcus luteus
gcccaccgcatggtgggtgt

SEQ ID NO: 45142 - DNA, 20 bp, Helcococcus ovis
aattaagttaaagaatttcg

SEQ ID NO: 45143 - DNA, 20 bp, Bacteroides ureolyticus
agcgtaaactccttttatca

SEQ ID NO: 45144 - DNA, 20 bp, Moraxella osloensis
gtggtgctagaatatgtgag

SEQ ID NO: 45145 - DNA, 20 bp, Streptococcus constellatus
caagagcatcactaccagat

SEQ ID NO: 45146 - DNA, 20 bp, Sphingobacterium multivorum
gtcggacgggatccatcgga

SEQ ID NO: 45147 - DNA, 20 bp, Bacillus alcalophilus
tatcactacgggatgggccc

SEQ ID NO: 45148 - DNA, 20 bp, Paenibacillus amylolyticus
gggaagaacgtccggtagag

SEQ ID NO: 45149 - DNA, 20 bp, Staphylococcus sciuri
atccgcgaggccaagcaaat

SEQ ID NO: 45150 - DNA, 20 bp, Corynebacterium group F
ttgctaccttgtgaggggat

SEQ ID NO: 45151 - DNA, 20 bp, Pseudoramibacter alactolyticus
cgagcctagagataggaagt

SEQ ID NO: 45152 - DNA, 20 bp, Anaerococcus prevotii
tagatattaaaaagaatacc

SEQ ID NO: 45153 - DNA, 20 bp, Dermacoccus nishinomiyaensis
atctccgcatggagtgttgg

SEQ ID NO: 45154 - DNA, 20 bp, Propionibacterium freudenreichii
gggttggaaagctttatgcg

SEQ ID NO: 45155 - DNA, 20 bp, Bacillus sp
cgctcgttccacatgcgtca

SEQ ID NO: 45156 - DNA, 20 bp, Klebsiella oxytoca
ggagtgaggttaataacctt

SEQ ID NO: 45157 - DNA, 20 bp, Facklamia hominis
ttcggctgtcgcaaaaggat

SEQ ID NO: 45158 - DNA, 20 bp, Aerococcus viridans
tccgcatggaagaagattga

SEQ ID NO: 45159 - DNA, 20 bp, Alicyclobacillus acidocaldarius
cggcctgaaaggcagattac

SEQ ID NO: 45160 - DNA, 20 bp, Tissierella praeacuta
atgtcgcatgagatttaagt

SEQ ID NO: 45161 - DNA, 20 bp, Bacteroides stercoris
cgtaaccgcgaggagcgtcc

SEQ ID NO: 45162 - DNA, 20 bp, Mannheimia haemolytica
ggaccatttggccacctgcc

SEQ ID NO: 45163 - DNA, 20 bp, Haemophilus influenzae
taatagcacatcaaattgac

SEQ ID NO: 45164 - DNA, 20 bp, Chryseobacterium meningosepticum
taagtagctgaaggtaccag

SEQ ID NO: 45165 - DNA, 20 bp, Anaerococcus prevotii
ttaagcaaacctcaaaaagt

SEQ ID NO: 45166 - DNA, 20 bp, Streptococcus equi
agaagttacttcggtacatt

SEQ ID NO: 45167 - DNA, 20 bp, Brevibacillus choshinensis
gaagagcttgctcttcggcg

SEQ ID NO: 45168 - DNA, 20 bp, Comamonas testosteroni
tacggaacgaaaagcctggg

SEQ ID NO: 45169 - DNA, 20 bp, Paenibacillus apiarius
tagggctcaaccttgggtcg

SEQ ID NO: 45170 - DNA, 20 bp, Eggerthella lenta
gggctccgccctccgtgccg

SEQ ID NO: 45171 - DNA, 20 bp, Aneurinibacillus thermoaerophilus
cctcccggtctgacggtacc

SEQ ID NO: 45172 - DNA, 20 bp, Bacteroides caccae
gccgcaaggcatttgtgaag

SEQ ID NO: 45173 - DNA, 20 bp, Staphylococcus succinus
cgtcaagatgcgcacagtta

SEQ ID NO: 45174 - DNA, 20 bp, Actinomyces neuii
tggattgggatgggctcgcg

SEQ ID NO: 45175 - DNA, 20 bp, Moraxella bovis
aacgatgactatctagcttg

SEQ ID NO: 45176 - DNA, 20 bp, Propionibacterium acnes
taatcttggggcttaaccct

SEQ ID NO: 45177 - DNA, 20 bp, Pseudoramibacter alactolyticus
tcagctgtcgaaggtgggat

SEQ ID NO: 45178 - DNA, 20 bp, Pediococcus inopinatus
gcccaccaaggctgtgatac

SEQ ID NO: 45179 - DNA, 20 bp, Prevotella melaninogenica
gattgtttgcaggtaccata

SEQ ID NO: 45180 - DNA, 20 bp, Corynebacterium glucuronolyticum
ctgcactgggggataagctt

SEQ ID NO: 45181 - DNA, 20 bp, Bacteroides merdae
gctgatagataggcatgcgt

SEQ ID NO: 45182 - DNA, 20 bp, Actinomyces meyeri
tactggatattcactggtct

SEQ ID NO: 45183 - DNA, 20 bp, Clostridium clostridiiforme
acagggccgcatggtctggt

SEQ ID NO: 45184 - DNA, 20 bp, Bacillus coagulans
cggggctaataccagatagt

SEQ ID NO: 45185 - DNA, 20 bp, Tissierella praeacuta
aaagcgtaaagcggtaaaag

SEQ ID NO: 45186 - DNA, 20 bp, Bacillus pallidus
gttagagggtatccaccctt

SEQ ID NO: 45187 - DNA, 20 bp, Oligella ureolytica
agtcttaggctaatacctta

SEQ ID NO: 45188 - DNA, 20 bp, Fusobacterium varium
ggatattatgactgagtcgc

SEQ ID NO: 45189 - DNA, 20 bp, Actinobacillus ureae
taatatcttaggattaaagt

SEQ ID NO: 45190 - DNA, 20 bp, Clostridium subterminale
tatgagaatcgcatgatttt

SEQ ID NO: 45191 - DNA, 20 bp, Bacteroides fragilis
taaattgcagtggaatgatg

SEQ ID NO: 45192 - DNA, 20 bp, Prevotella intermedia
gaaagacggcctaatacccg

SEQ ID NO: 45193 - DNA, 20 bp, Clostridium paraputrificum
agattgtagcttcgcatgaa

SEQ ID NO: 45194 - DNA, 20 bp, Campylobacter sputorum
tcatggcagtaatccaccta

SEQ ID NO: 45195 - DNA, 20 bp, Bacteroides uniformis
ccaccaagccttcgatggat

SEQ ID NO: 45196 - DNA, 20 bp, Shewanella algae
aatttgcccatttgtggggg

SEQ ID NO: 45197 - DNA, 20 bp, Comamonas testosteroni
tagagcggctgatggcagat

SEQ ID NO: 45198 - DNA, 20 bp, Leptotrichia buccalis
aaacgactgataatacctga

SEQ ID NO: 45199 - DNA, 20 bp, Haemophilus segnis
tagcgaggaaggcatttagt

SEQ ID NO: 45200 - DNA, 20 bp, Pseudomonas luteola
aaactgcctggctagagtac

SEQ ID NO: 45201 - DNA, 20 bp, Helcococcus ovis
gagtgctagttgtcgggagt

SEQ ID NO: 45202 - DNA, 20 bp, Campylobacter curvus
ttggggaagaaatttgacgg

SEQ ID NO: 45203 - DNA, 20 bp, Weeksella virosa
aggtagcatatgaataagca

SEQ ID NO: 45204 - DNA, 20 bp, Actinomyces bovis
ttaaccccgtgatgccatag

SEQ ID NO: 45205 - DNA, 20 bp, Myroides odoratus
aagatgggcatgcgtatcat

SEQ ID NO: 45206 - DNA, 20 bp, Serratia marcescens
taatacgctcatcaattgac

SEQ ID NO: 45207 - DNA, 20 bp, Helcococcus kunzii
gcaatacccgaagtcgtcga

SEQ ID NO: 45208 - DNA, 20 bp, Corynebacterium auris
cagagatggtctttcccttt

SEQ ID NO: 45209 - DNA, 20 bp, Staphylococcus capitis
ccggataggacagctgttta

SEQ ID NO: 45210 - DNA, 20 bp, Clostridium clostridiiforme
gtgtgtgaaaaactccggtg

SEQ ID NO: 45211 - DNA, 20 bp, Lactobacillus acidophilus
ccgtagagatacggagttcc

SEQ ID NO: 45212 - DNA, 20 bp, Bacteroides fragilis
agaataaagtgcagtatgta

SEQ ID NO: 45213 - DNA, 20 bp, Facklamia ignava
ccctcagtgctggcgcaaac

SEQ ID NO: 45214 - DNA, 20 bp, Alcaligenes faecalis
gaaagccgaagagatttggc

SEQ ID NO: 45215 - DNA, 20 bp, Arcanobacterium bernardiae
agtacagaacaaggcctttt

SEQ ID NO: 45216 - DNA, 20 bp, Moraxella osloensis
gtggctcattaagtcacatg

SEQ ID NO: 45217 - DNA, 20 bp, Streptococcus porcinus
catgaaagtagaagacccat

SEQ ID NO: 45218 - DNA, 20 bp, Weeksella virosa
catcatttagttttgaaaga

SEQ ID NO: 45219 - DNA, 20 bp, Brevibacillus laterosporus
agtctgatgttaaagcccga

SEQ ID NO: 45220 - DNA, 20 bp, Helcococcus kunzii
aagcaagccctggctaaata

SEQ ID NO: 45221 - DNA, 20 bp, Bacteroides uniformis
gacgtgatgctaatccctaa

SEQ ID NO: 45222 - DNA, 20 bp, Veillonella atypica
agcttgcttctatcaatctt

SEQ ID NO: 45223 - DNA, 20 bp, Anaerococcus prevotii
gaaatcttgacagaaccctt

SEQ ID NO: 45224 - DNA, 20 bp, Cardiobacterium hominis
ttctgggtcgatactgacgc

SEQ ID NO: 45225 - DNA, 20 bp, Acinetobacter calcoaceticus
gctactgaagttaatacctt

SEQ ID NO: 45226 - DNA, 20 bp, Clostridium ramosum
tagaggatggacttatggcg

SEQ ID NO: 45227 - DNA, 20 bp, Bacillus sp
atggagagagattgaaagat

SEQ ID NO: 45228 - DNA, 20 bp, Actinomyces naeslundii
ctttgtgggggctggttcac

SEQ ID NO: 45229 - DNA, 20 bp, Bacteroides fragilis
tcaccgctgtgaaggtgctg

SEQ ID NO: 45230 - DNA, 20 bp, Eubacterium moniliforme
tcaacacctctgtgccgccg

SEQ ID NO: 45231 - DNA, 20 bp, Helcococcus ovis
tttcttcggaaacttgtata

SEQ ID NO: 45232 - DNA, 20 bp, Corynebacterium afermentans
atgcggtcgcagctcgtatc

SEQ ID NO: 45233 - DNA, 20 bp, Oligella ureolytica
ggaaccctgatcgagccatc

SEQ ID NO: 45234 - DNA, 20 bp, Tissierella praeacuta
taccttatgacacttaaatg

SEQ ID NO: 45235 - DNA, 20 bp, Bacteroides thetaiotaomicron
catttcagtttgcttgcaaa

SEQ ID NO: 45236 - DNA, 20 bp, Brochothrix campestris
aacctgcctcacagctgggg

SEQ ID NO: 45237 - DNA, 20 bp, Brevibacillus brevis
catgaggaaaagctgaaagt

SEQ ID NO: 45238 - DNA, 20 bp, Corynebacterium group F
acaactttttggatattgtt

SEQ ID NO: 45239 - DNA, 20 bp, Microbacterium hominis
cagtagctggaaagattttt

SEQ ID NO: 45240 - DNA, 20 bp, Bacteroides forsythus
ggcgtaagctgtgaggaagg

SEQ ID NO: 45241 - DNA, 20 bp, Facklamia ignava
cccctcagtgctggcgcaaa

SEQ ID NO: 45242 - DNA, 20 bp, Moraxella atlantae
aacgggtgagtaacatttag

SEQ ID NO: 45243 - DNA, 20 bp, Alcaligenes faecalis
aagtacttttggcagagaag

SEQ ID NO: 45244 - DNA, 20 bp, Staphylococcus kloosii
acagtgaaagatggctttgc

SEQ ID NO: 45245 - DNA, 20 bp, Streptococcus oralis
gagtagaacgctgaagcttg

SEQ ID NO: 45246 - DNA, 20 bp, Leptotrichia buccalis
ctgtgagaacaggcagtgcc

SEQ ID NO: 45247 - DNA, 20 bp, Propionibacterium avidum
cagagatgggtatgcctcct

SEQ ID NO: 45248 - DNA, 20 bp, Enterococcus raffinosus
tggccttgctatcacttata

SEQ ID NO: 45249 - DNA, 20 bp, Peptoniphilus indolicus
agtaacctgcctttgacacg

SEQ ID NO: 45250 - DNA, 20 bp, Streptococcus sobrinus
aagaagccattgcttcacta

SEQ ID NO: 45251 - DNA, 20 bp, Haemophilus paraphrophilus
aaggttgttgtgtgaatagc

SEQ ID NO: 45252 - DNA, 20 bp, Helcococcus ovis
cgggagtcaaatctcggtga

SEQ ID NO: 45253 - DNA, 20 bp, Arcanobacterium pyogenes
gaacgatgaagccggggctt

SEQ ID NO: 45254 - DNA, 20 bp, Aerococcus viridans
ttcttccgcatggaagaaga

SEQ ID NO: 45255 - DNA, 20 bp, Bacteroides capilosus
gccaaagatttatcgctctg

SEQ ID NO: 45256 - DNA, 20 bp, Corynebacterium group F
accttgtgaggggatgctaa

SEQ ID NO: 45257 - DNA, 20 bp, Eggerthella lenta
gctcaacccccggccggatc

SEQ ID NO: 45258 - DNA, 20 bp, Turicella otitidis
catttttagtgtgatggttg

SEQ ID NO: 45259 - DNA, 20 bp, Bacillus pumilus
catggttcaaggatgaaaga

SEQ ID NO: 45260 - DNA, 20 bp, Campylobacter rectus
acaaatcatccagagatgga

SEQ ID NO: 45261 - DNA, 20 bp, Neisseria meningitidis
ctgatattagcaacagcctt

SEQ ID NO: 45262 - DNA, 20 bp, Staphylococcus muscae
cactagagatagtgttttcc

SEQ ID NO: 45263 - DNA, 20 bp, Streptococcus iniae
agtagaacgctgaggattgg

SEQ ID NO: 45264 - DNA, 20 bp, Corynebacterium xerosis
tctgacggtagatggagaag

SEQ ID NO: 45265 - DNA, 20 bp, Bacteroides fragilis
aattgcagttgatactgtca

SEQ ID NO: 45266 - DNA, 20 bp, Paenibacillus validus
gaacgcctcggagagtaact

SEQ ID NO: 45267 - DNA, 20 bp, Anaerococcus prevotii
tcggaagcctcaatacaggt

SEQ ID NO: 45268 - DNA, 20 bp, Tissierella praeacuta
caaccgtggtaagcatttga

SEQ ID NO: 45269 - DNA, 20 bp, Actinomyces bovis
ttgacataccgcgcaaaagc

SEQ ID NO: 45270 - DNA, 20 bp, Corynebacterium falsenii
tctacgatttccgtgccgta

SEQ ID NO: 45271 - DNA, 20 bp, Moraxella osloensis
atatgtgagagggaagtaga

SEQ ID NO: 45272 - DNA, 20 bp, Veillonella atypica
ctgctgatctagagtatcgg

SEQ ID NO: 45273 - DNA, 20 bp, Alicyclobacillus acidocaldarius
ttcggcactggggtgtgtcc

SEQ ID NO: 45274 - DNA, 20 bp, Streptococcus agalactiae
tgttagttatttaaaaggag

SEQ ID NO: 45275 - DNA, 20 bp, Arcanobacterium bernardiae
tattctgctttcatcgcatg

SEQ ID NO: 45276 - DNA, 20 bp, Campylobacter lari
agggaagaaccatgacggta

SEQ ID NO: 45277 - DNA, 20 bp, Bacillus pumilus
tcaaggatgaaagacggttt

SEQ ID NO: 45278 - DNA, 20 bp, Tetragenococcus halophilus
agctctgttgtcagcaaaga

SEQ ID NO: 45279 - DNA, 20 bp, Streptococcus hyovaginalis
acatcccagtgaccatccta

SEQ ID NO: 45280 - DNA, 20 bp, Listeria innocua
ggcgcatgccacgctcttga

SEQ ID NO: 45281 - DNA, 20 bp, Anaerococcus tetradius
gcgtgatttagaaggccttc

SEQ ID NO: 45282 - DNA, 20 bp, Bacteroides thetaiotaomicron
tggctgtcttgagtacagta

SEQ ID NO: 45283 - DNA, 20 bp, Bacteroides fragilis
aagtcgaggggcatcaggaa

SEQ ID NO: 45284 - DNA, 20 bp, Campylobacter concisus
catacaccggaccgggccag

SEQ ID NO: 45285 - DNA, 20 bp, Porphyromonas endodontalis
aagctgcagctcaactgtag

SEQ ID NO: 45286 - DNA, 20 bp, Bacteroides fragilis
tccattaggttgttggtgag

SEQ ID NO: 45287 - DNA, 20 bp, Peptoniphilus indolicus
gcgatagcaagcgaatctca

SEQ ID NO: 45288 - DNA, 20 bp, Clostridium botulinum
tcaactccccctgtgccgca

SEQ ID NO: 45289 - DNA, 20 bp, Oligella ureolytica
tagttgaggaataagcaccg

SEQ ID NO: 45290 - DNA, 20 bp, Myroides odoratus
aaattgccgttgatactgct

SEQ ID NO: 45291 - DNA, 20 bp, Bacillus fusiformis
ttgctccttcgacgttagcg

SEQ ID NO: 45292 - DNA, 20 bp, Streptococcus suis
cacttgacggtatcttacca

SEQ ID NO: 45293 - DNA, 20 bp, Peptoniphilus indolicus
gtgaattagcggtcaaagat

SEQ ID NO: 45294 - DNA, 20 bp, Oligella urethralis
cgtcccacacgcgagatggc

SEQ ID NO: 45295 - DNA, 20 bp, Stenotrophomonas maltophilia
cctttcagcggggaaggaag

SEQ ID NO: 45296 - DNA, 20 bp, Anaerococcus prevotii
ccggtatagagatataccct

SEQ ID NO: 45297 - DNA, 20 bp, Aerococcus christensenii
ctttcaaagttagcggcgga

SEQ ID NO: 45298 - DNA, 20 bp, Neisseria polysaccharea
tgttgctaatatcagcggct

SEQ ID NO: 45299 - DNA, 20 bp, Moraxella bovis
gatgactatctagcttgcta

SEQ ID NO: 45300 - DNA, 20 bp, Corynebacterium mycetoides
caggatgagcgctggcggcg

SEQ ID NO: 45301 - DNA, 20 bp, Chromobacterium violaceum
acggcattggagactgcaca

SEQ ID NO: 45302 - DNA, 20 bp, Campylobacter lari
gttgagtagggaaagttttt

SEQ ID NO: 45303 - DNA, 20 bp, Acinetobacter junii
tactgagactaatactcttg

SEQ ID NO: 45304 - DNA, 20 bp, Methylobacterium mesophilicum
tagcgcagctaacgctttga

SEQ ID NO: 45305 - DNA, 20 bp, Leptotrichia buccalis
acttgccctgcagacaggga

SEQ ID NO: 45306 - DNA, 20 bp, Campylobacter lari
aatactctatactcctgctt

SEQ ID NO: 45307 - DNA, 20 bp, Bacillus pallidus
gaatcccaaaaaaccactct

SEQ ID NO: 45308 - DNA, 20 bp, Brochothrix campestris
agatgttcaagtgaaagacg

SEQ ID NO: 45309 - DNA, 20 bp, Prevotella corporis
gcgccactgacgctgaggct

SEQ ID NO: 45310 - DNA, 20 bp, Veillonella dispar
aacctcggcatcgaggatag

SEQ ID NO: 45311 - DNA, 20 bp, Proteus vulgaris
ttagaggttgtggtcttgaa

SEQ ID NO: 45312 - DNA, 20 bp, Moraxella  catarrhalis
ggaaaagcttatggttaata

SEQ ID NO: 45313 - DNA, 20 bp, Propionibacterium acnes
cgttgtgggggagccgtcga

SEQ ID NO: 45314 - DNA, 20 bp, Haemophilus paraphrophilus
gaaggttgttgtgtgaatag

SEQ ID NO: 45315 - DNA, 20 bp, Corynebacterium hoagii
ggggttggaaaggtttactg

SEQ ID NO: 45316 - DNA, 20 bp, Neisseria lactamica
tcggggaagaaaaggtcggg

SEQ ID NO: 45317 - DNA, 20 bp, Peptostreptococcus anaerobius
tcccttagaccggtgtttaa

SEQ ID NO: 45318 - DNA, 20 bp, Moraxella osloensis
cataatattgacactgagat

SEQ ID NO: 45319 - DNA, 20 bp, Campylobacter concisus
cgtcgtttgtgtaagcccgc

SEQ ID NO: 45320 - DNA, 20 bp, Pseudoramibacter alactolyticus
agggactgccgtagacaata

SEQ ID NO: 45321 - DNA, 20 bp, Peptostreptococcus anaerobius
agcggtataggatggacccg

SEQ ID NO: 45322 - DNA, 20 bp, Actinomyces bovis
tttatcaagtttatggttaa

SEQ ID NO: 45323 - DNA, 20 bp, Suttonella indologenes
acgtatggaaacgtacgcta

SEQ ID NO: 45324 - DNA, 20 bp, Streptococcus canis
gggagtggaaaacccattat

SEQ ID NO: 45325 - DNA, 20 bp, Porphyromonas endodontalis
cacacagaacgccgattgcg

SEQ ID NO: 45326 - DNA, 20 bp, Facklamia ignava
acgggacaagaagacaggtg

SEQ ID NO: 45327 - DNA, 20 bp, Prevotella intermedia
tcgaggggaaacggcattat

SEQ ID NO: 45328 - DNA, 20 bp, Tetragenococcus halophilus
agtacaacgagcaagccaag

SEQ ID NO: 45329 - DNA, 20 bp, Actinomyces bovis
gcggctaactggcctgtaac

SEQ ID NO: 45330 - DNA, 20 bp, Bacteroides merdae
ctccaaaccatgtctcagtt

SEQ ID NO: 45331 - DNA, 20 bp, Prevotella loescheii
cccaccgtggctacgatcgg

SEQ ID NO: 45332 - DNA, 20 bp, Streptococcus constellatus
atgcaccgtagtttactaca

SEQ ID NO: 45333 - DNA, 20 bp, Pasteurella multocida
gaagggatgttgttaaatag

SEQ ID NO: 45334 - DNA, 20 bp, Kingella denitrificans
gggaagtgttaataccactt

SEQ ID NO: 45335 - DNA, 20 bp, Actinomyces odontolyticus
catttagttggtcgtgtgca

SEQ ID NO: 45336 - DNA, 20 bp, Bacillus pallidus
tcggttgaaaggcggctttt

SEQ ID NO: 45337 - DNA, 20 bp, Gemella haemolysans
taccggataacagcattaac

SEQ ID NO: 45338 - DNA, 20 bp, Corynebacterium group F
aggggatgctaatcgcacaa

SEQ ID NO: 45339 - DNA, 20 bp, Streptococcus thoraltensis
agagtggaaagtttactcta

SEQ ID NO: 45340 - DNA, 20 bp, Peptostreptococcus anaerobius
gcctccgaaactggaagact

SEQ ID NO: 45341 - DNA, 20 bp, Stenotrophomonas maltophilia
tgcagtggatactggatgac

SEQ ID NO: 45342 - DNA, 20 bp, Corynebacterium urealyticum
ttttcggtggaggatgagcc

SEQ ID NO: 45343 - DNA, 20 bp, Bacteroides fragilis
ttgctttctttgctggcgac

SEQ ID NO: 45344 - DNA, 20 bp, Corynebacterium propinquum
tggggtttctgtgccgtagc

SEQ ID NO: 45345 - DNA, 20 bp, Acinetobacter calcoaceticus
cgaggaggaggctactgaag

SEQ ID NO: 45346 - DNA, 20 bp, Facklamia hominis
atcaacgaaggaaagacggc

SEQ ID NO: 45347 - DNA, 20 bp, Propionibacterium freudenreichii
cggacggtaaggcccctttc

SEQ ID NO: 45348 - DNA, 20 bp, Lactococcus lactis
tagagaagaacgttggtgag

SEQ ID NO: 45349 - DNA, 20 bp, Actinomyces bovis
taaccccgtgatgccataga

SEQ ID NO: 45350 - DNA, 20 bp, Pseudoramibacter alactolyticus
gaatgatccttcgggtgaaa

SEQ ID NO: 45351 - DNA, 20 bp, Brevibacillus choshinensis
ataccggatacttctttcag

SEQ ID NO: 45352 - DNA, 20 bp, Campylobacter lari
ccgttgaactgcttgggaaa

SEQ ID NO: 45353 - DNA, 20 bp, Campylobacter rectus
atcatccagagatggaagag

SEQ ID NO: 45354 - DNA, 20 bp, Propionibacterium freudenreichii
ggaaagctttatgcggtcag

SEQ ID NO: 45355 - DNA, 20 bp, Porphyromonas endodontalis
tgtactctacgaataagtat

SEQ ID NO: 45356 - DNA, 20 bp, Leuconostoc lactis
accgcatggtgtagggttga

SEQ ID NO: 45357 - DNA, 20 bp, Wolinella succinogenes
aataccgcataatgttgaaa

SEQ ID NO: 45358 - DNA, 20 bp, Brochothrix campestris
cgaatgtgctgaacatcata

SEQ ID NO: 45359 - DNA, 20 bp, Staphylococcus carnosus
accgcatggttctgcaatga

SEQ ID NO: 45360 - DNA, 20 bp, Porphyromonas endodontalis
caacctgcctgtaattaggg

SEQ ID NO: 45361 - DNA, 20 bp, Propionibacterium freudenreichii
gaatatgagcctggcctgca

SEQ ID NO: 45362 - DNA, 20 bp, Bacteroides fragilis
caatcaccgctgtgaaggtg

SEQ ID NO: 45363 - DNA, 20 bp, Ochrobactrum intermedium
gttagtcttgagtatggtag

SEQ ID NO: 45364 - DNA, 20 bp, Listeria innocua
ccacgctcttgaaagatggt

SEQ ID NO: 45365 - DNA, 20 bp, Actinomyces naeslundii
gcatgaaagtgtggctaata

SEQ ID NO: 45366 - DNA, 20 bp, Prevotella loescheii
atccccgatggcgaccggcg

SEQ ID NO: 45367 - DNA, 20 bp, Tissierella praeacuta
aaaggctcaccaagacagcg

SEQ ID NO: 45368 - DNA, 20 bp, Shewanella algae
cgggccttgcgctgatggat

SEQ ID NO: 45369 - DNA, 20 bp, Bacillus lentus
cttcttattggttcgctcga

SEQ ID NO: 45370 - DNA, 20 bp, Prevotella oris
gcctgaagtctgtgaccgca

SEQ ID NO: 45371 - DNA, 20 bp, Clostridium paraputrificum
tcgcatgaagtagcaattaa

SEQ ID NO: 45372 - DNA, 20 bp, Anaerococcus tetradius
ccgcgtgatttagaaggcct

SEQ ID NO: 45373 - DNA, 20 bp, Bacteroides merdae
catgggaatatttgttaaag

SEQ ID NO: 45374 - DNA, 20 bp, Paenibacillus validus
ctctgagggtgacggtactt

SEQ ID NO: 45375 - DNA, 20 bp, Streptococcus constellatus
ggctcaggacgacgctggcg

SEQ ID NO: 45376 - DNA, 20 bp, Porphyromonas endodontalis
atttattgattacagatggg

SEQ ID NO: 45377 - DNA, 20 bp, Porphyromonas endodontalis
gatttattgattacagatgg

SEQ ID NO: 45378 - DNA, 20 bp, Achromobacter xylosoxidans
cgcggaactgacggtacctg

SEQ ID NO: 45379 - DNA, 20 bp, Weeksella virosa
atgggttagcgcctgatcca

SEQ ID NO: 45380 - DNA, 20 bp, Streptococcus hyovaginalis
gggagtaagagtggaaagtt

SEQ ID NO: 45381 - DNA, 20 bp, Neisseria meningitidis
cgaatagcgcaaggcccaaa

SEQ ID NO: 45382 - DNA, 20 bp, Dermacoccus nishinomiyaensis
catgcagagatgtgtgcgtc

SEQ ID NO: 45383 - DNA, 20 bp, Acinetobacter lwoffii
tctagttaatacctagggat

SEQ ID NO: 45384 - DNA, 20 bp, Leuconostoc argentinum
actggttaacttgagtgttg

SEQ ID NO: 45385 - DNA, 20 bp, Facklamia sourekii
tgaggccaagcgaatctctt

SEQ ID NO: 45386 - DNA, 20 bp, Actinomyces meyeri
aggcttgacatgcgccctgg

SEQ ID NO: 45387 - DNA, 20 bp, Moraxella  catarrhalis
cagtcgttgggtcttttaaa

SEQ ID NO: 45388 - DNA, 20 bp, Bacillus coagulans
ggaggctgttcccctgagga

SEQ ID NO: 45389 - DNA, 20 bp, Arthrobacter globiformis
aaagatttattggtcttgga

SEQ ID NO: 45390 - DNA, 20 bp, Gemella sanguinis
tatacagtagagacggtacc

SEQ ID NO: 45391 - DNA, 20 bp, Streptococcus suis
aggatttttcttcggaacac

SEQ ID NO: 45392 - DNA, 20 bp, Lactococcus lactis
gtggggaatctgcctttgag

SEQ ID NO: 45393 - DNA, 20 bp, Helcococcus kunzii
gggtatgtaggcggttaatt

SEQ ID NO: 45394 - DNA, 20 bp, Nocardia asteroides
gcttcggtaactgacctagc

SEQ ID NO: 45395 - DNA, 20 bp, Helcococcus ovis
agttgaacgagaatttttta

SEQ ID NO: 45396 - DNA, 20 bp, Acinetobacter radioresistens
cctagattaatactttagga

SEQ ID NO: 45397 - DNA, 20 bp, Stenotrophomonas maltophilia
atactgggcgactagaatgt

SEQ ID NO: 45398 - DNA, 20 bp, Clostridium sordellii
ctttcaagccagaagtgaaa

SEQ ID NO: 45399 - DNA, 20 bp, Corynebacterium xerosis
ttgtaaactcctttcaccat

SEQ ID NO: 45400 - DNA, 20 bp, Porphyromonas endodontalis
gaaagatttattgattacag

SEQ ID NO: 45401 - DNA, 20 bp, Dermabacter hominis
tccactttgggataactccg

SEQ ID NO: 45402 - DNA, 20 bp, Weeksella virosa
atttttcttcggacagaatg

SEQ ID NO: 45403 - DNA, 20 bp, Corynebacterium urealyticum
ggcaagctggagtgctgtag

SEQ ID NO: 45404 - DNA, 20 bp, Bacteroides fragilis
agtggaatgatgtggaaaca

SEQ ID NO: 45405 - DNA, 20 bp, Veillonella dispar
agagatagttcctcttcttc

SEQ ID NO: 45406 - DNA, 20 bp, Bacteroides capilosus
gggaataacagtccgaaagg

SEQ ID NO: 45407 - DNA, 20 bp, Corynebacterium glucuronolyticum
gacgaagtttttttgacggt

SEQ ID NO: 45408 - DNA, 20 bp, Gemella bergeri
gtgttggtctcaaaagagat

SEQ ID NO: 45409 - DNA, 20 bp, Fusobacterium varium
ttttcgtgcctcttcggagg

SEQ ID NO: 45410 - DNA, 20 bp, Helcococcus kunzii
agaagcaagccctggctaaa

SEQ ID NO: 45411 - DNA, 20 bp, Tetragenococcus halophilus
taaagctctgttgtcagcaa

SEQ ID NO: 45412 - DNA, 20 bp, Actinomyces neuii
ctggattgggatgggctcgc

SEQ ID NO: 45413 - DNA, 20 bp, Prevotella melaninogenica
tgccgaaaggcagactaata

SEQ ID NO: 45414 - DNA, 20 bp, Gemella morbillorum
ataccggataacagtatttc

SEQ ID NO: 45415 - DNA, 20 bp, Brevibacterium epidermidis
cactggaccgttctggaaac

SEQ ID NO: 45416 - DNA, 20 bp, Helcococcus ovis
ttagatatcgcatgataatt

SEQ ID NO: 45417 - DNA, 20 bp, Streptococcus bovis
tttagcttgctagagtagaa

SEQ ID NO: 45418 - DNA, 20 bp, Prevotella melaninogenica
ggccggagattaagtgtgtt

SEQ ID NO: 45419 - DNA, 20 bp, Geobacillus thermoglucosidasius
acggtgacggtacctaacga

SEQ ID NO: 45420 - DNA, 20 bp, Porphyromonas endodontalis
gcagctcaactgtagtcttg

SEQ ID NO: 45421 - DNA, 20 bp, Bacillus lentus
tttcctccgatacttgttct

SEQ ID NO: 45422 - DNA, 20 bp, Enterococcus cecorum
actctagcgagactgccgca

SEQ ID NO: 45423 - DNA, 20 bp, Prevotella oris
taacccgtcgaaagtcggcc

SEQ ID NO: 45424 - DNA, 20 bp, Bacteroides thetaiotaomicron
ttgcagttgatactggctgt

SEQ ID NO: 45425 - DNA, 20 bp, Suttonella indologenes
aggcagccttctggggcaat

SEQ ID NO: 45426 - DNA, 20 bp, Actinomyces bovis
cttatatgacggtaccttac

SEQ ID NO: 45427 - DNA, 20 bp, Dermabacter hominis
agatgtggttttctttggac

SEQ ID NO: 45428 - DNA, 20 bp, Clostridium ramosum
cttatggcgcattagctggt

SEQ ID NO: 45429 - DNA, 20 bp, Bacillus thuringiensis
atcctctgaaaaccctagag

SEQ ID NO: 45430 - DNA, 20 bp, Peptostreptococcus anaerobius
gaccggtgtttaatcacacc

SEQ ID NO: 45431 - DNA, 20 bp, Fusobacterium nucleatum
ttaacttagatttgggtggc

SEQ ID NO: 45432 - DNA, 20 bp, Staphylococcus carnosus
gttctgcaatgaaagacggt

SEQ ID NO: 45433 - DNA, 20 bp, Tissierella praeacuta
tcagatgtgaaagatcacgg

SEQ ID NO: 45434 - DNA, 20 bp, Bacillus smithii
tggtacaaagggtcgcgaaa

SEQ ID NO: 45435 - DNA, 20 bp, Microbacterium terregens
gctgtgaaaccccgaggctc

SEQ ID NO: 45436 - DNA, 20 bp, Gemella haemolysans
tagtaactatacacagtaga

SEQ ID NO: 45437 - DNA, 20 bp, Prevotella bivia
tatccaacctacccataact

SEQ ID NO: 45438 - DNA, 20 bp, Paenibacillus peoriae
aagaaggaggaaagacggag

SEQ ID NO: 45439 - DNA, 20 bp, Actinomyces turicensis
tggtcaagccgcagctttgg

SEQ ID NO: 45440 - DNA, 20 bp, Corynebacterium auris
aggtgtgagcctcttccacg

SEQ ID NO: 45441 - DNA, 20 bp, Lactococcus raffinolactis
ctcgtgctattcctagagat

SEQ ID NO: 45442 - DNA, 20 bp, Bacteroides capilosus
tgtggggggactgaccccct

SEQ ID NO: 45443 - DNA, 20 bp, Haemophilus actinemycetemcomitans
ggggtttagccctggtgccc

SEQ ID NO: 45444 - DNA, 20 bp, Prevotella oris
gccgtggattaagcgtgttg

SEQ ID NO: 45445 - DNA, 20 bp, Citrobacter sedlakii
gaagactgcagagatgcggt

SEQ ID NO: 45446 - DNA, 20 bp, Weeksella virosa
gatttttcttcggacagaat

SEQ ID NO: 45447 - DNA, 20 bp, Bacillus lentus
tgctggcaactagaaccaag

SEQ ID NO: 45448 - DNA, 20 bp, Alicyclobacillus acidocaldarius
ctacgagcggctttttgggt

SEQ ID NO: 45449 - DNA, 20 bp, Campylobacter lari
aaccttatagagatatgagg

SEQ ID NO: 45450 - DNA, 20 bp, Corynebacterium falsenii
catatgcaggatcgctgcag

SEQ ID NO: 45451 - DNA, 20 bp, Corynebacterium urealyticum
ggaagaagccttcgggtgac

SEQ ID NO: 45452 - DNA, 20 bp, Actinomyces bovis
cccgtgatgccatagaaact

SEQ ID NO: 45453 - DNA, 20 bp, Clostridium septicum
tccttccgtgccgccgttaa

SEQ ID NO: 45454 - DNA, 20 bp, Streptococcus porcinus
ctacttaaaaggggcaactg

SEQ ID NO: 45455 - DNA, 20 bp, Methylobacterium mesophilicum
cttgcaccgcagtagcgcag

SEQ ID NO: 45456 - DNA, 20 bp, Campylobacter lari
tgctagtcacggcagtaatg

SEQ ID NO: 45457 - DNA, 20 bp, Streptococcus thoraltensis
gctggtgacagtaagctaat

SEQ ID NO: 45458 - DNA, 20 bp, Haemophilus actinemycetemcomitans
ggggatgtactgacgctgat

SEQ ID NO: 45459 - DNA, 20 bp, Bacteroides merdae
tgtggctcaaccataaaatt

SEQ ID NO: 45460 - DNA, 20 bp, Prevotella loescheii
agccagacggcggggtaacg

SEQ ID NO: 45461 - DNA, 20 bp, Veillonella atypica
atttgacggtaccggaatag

SEQ ID NO: 45462 - DNA, 20 bp, Serratia marcescens
aaggtggtgagcttaatacg

SEQ ID NO: 45463 - DNA, 20 bp, Weeksella virosa
agctaccaggtgactggatg

SEQ ID NO: 45464 - DNA, 20 bp, Veillonella atypica
aattcgacgcaacgcgaaga

SEQ ID NO: 45465 - DNA, 20 bp, Paenibacillus azotofixans
gaagctgggcactctagagt

SEQ ID NO: 45466 - DNA, 20 bp, Enterococcus dispar
ttgcgtcacttgaggatgga

SEQ ID NO: 45467 - DNA, 20 bp, Propionibacterium freudenreichii
cgtgaggaacgtgcccttga

SEQ ID NO: 45468 - DNA, 20 bp, Pediococcus inopinatus
agtaaccttcgggagctagc

SEQ ID NO: 45469 - DNA, 20 bp, Corynebacterium mycetoides
tgtaagtccacggcttaact

SEQ ID NO: 45470 - DNA, 20 bp, Campylobacter curvus
taataccttatactccgtat

SEQ ID NO: 45471 - DNA, 20 bp, Bacteroides uniformis
atgctaatccctaaagcctc

SEQ ID NO: 45472 - DNA, 20 bp, Ralstonia paucula
gaaagaaattgctctggcta

SEQ ID NO: 45473 - DNA, 20 bp, Methylobacterium mesophilicum
agagagatttggggtccact

SEQ ID NO: 45474 - DNA, 20 bp, Moraxella osloensis
ggagtctattgcaccagaag

SEQ ID NO: 45475 - DNA, 20 bp, Weeksella virosa
gtggtgaaatcctatcgctt

SEQ ID NO: 45476 - DNA, 20 bp, Oligella ureolytica
tgctgacggtagttgaggaa

SEQ ID NO: 45477 - DNA, 20 bp, Pasteurella multocida
ctctgaggaggaaagggtgg

SEQ ID NO: 45478 - DNA, 20 bp, Prevotella loescheii
tttttgcaggtaccgcatga

SEQ ID NO: 45479 - DNA, 20 bp, Brevibacterium epidermidis
ctgcccctgatttcgggata

SEQ ID NO: 45480 - DNA, 20 bp, Rothia mucilaginosa
ggcttaaccccgtgtattgc

SEQ ID NO: 45481 - DNA, 20 bp, Anaerococcus prevotii
aagcctcaatacaggtggtg

SEQ ID NO: 45482 - DNA, 20 bp, Bacteroides thetaiotaomicron
tttatatgggaataaagttt

SEQ ID NO: 45483 - DNA, 20 bp, Bacillus coagulans
gtaacctttacggagccagc

SEQ ID NO: 45484 - DNA, 20 bp, Chryseobacterium meningosepticum
aaatgacagatttagaaata

SEQ ID NO: 45485 - DNA, 20 bp, Atopobium parvulum
atacgagaccgccggcgtca

SEQ ID NO: 45486 - DNA, 20 bp, Prevotella intermedia
ctgttagcgcctggcgttag

SEQ ID NO: 45487 - DNA, 20 bp, Paenibacillus peoriae
agcggggttgtttagaagct

SEQ ID NO: 45488 - DNA, 20 bp, Moraxella osloensis
gggggcgcaagctcttgcta

SEQ ID NO: 45489 - DNA, 20 bp, Gemella bergeri
gaagacggtgacctaaccga

SEQ ID NO: 45490 - DNA, 20 bp, Aerococcus christensenii
aagcgactttctggtctgtc

SEQ ID NO: 45491 - DNA, 20 bp, Paenibacillus thiaminolyticus
ggaagaacgctatggagagt

SEQ ID NO: 45492 - DNA, 20 bp, Veillonella atypica
tactacaatgggagttaata

SEQ ID NO: 45493 - DNA, 20 bp, Micromonas micros
acgtgagcaacctaccttac

SEQ ID NO: 45494 - DNA, 20 bp, Streptococcus equi
gtcgtacaaggtagccgttc

SEQ ID NO: 45495 - DNA, 20 bp, Haemophilus actinemycetemcomitans
ccccttggggatgtactgac

SEQ ID NO: 45496 - DNA, 20 bp, Geobacillus thermoglucosidasius
tcgagcggaccgggcgggag

SEQ ID NO: 45497 - DNA, 20 bp, Streptococcus thermophilus
tggatgacacatgtcattta

SEQ ID NO: 45498 - DNA, 20 bp, Chromobacterium violaceum
gcccttatgagcagggcttc

SEQ ID NO: 45499 - DNA, 20 bp, Actinomyces neuii
ggttttggccttgttgatgg

SEQ ID NO: 45500 - DNA, 20 bp, Finegoldia magna
gtggagaggaaagtggaatt

SEQ ID NO: 45501 - DNA, 20 bp, Anaerococcus prevotii
aaagggaagcgaaatagtga

SEQ ID NO: 45502 - DNA, 20 bp, Neisseria meningitidis
accgcatacgtcttgagaga

SEQ ID NO: 45503 - DNA, 20 bp, Actinomyces bovis
ataggaagagggaatgcttc

SEQ ID NO: 45504 - DNA, 20 bp, Bacteroides uniformis
gcagctacacggcgacgtga

SEQ ID NO: 45505 - DNA, 20 bp, Providencia alcalifaciens
cgaagttcccctgctttgct

SEQ ID NO: 45506 - DNA, 20 bp, Clostridium innocuum
ctcatagaggaaatgctatg

SEQ ID NO: 45507 - DNA, 20 bp, Chromobacterium violaceum
tgttgggggtttgaatcctt

SEQ ID NO: 45508 - DNA, 20 bp, Brevibacterium epidermidis
tgacatacactggaccgttc

SEQ ID NO: 45509 - DNA, 20 bp, Campylobacter rectus
ttcgctagtcgaggcagtaa

SEQ ID NO: 45510 - DNA, 20 bp, Campylobacter rectus
aagaattatgacggtaccca

SEQ ID NO: 45511 - DNA, 20 bp, Corynebacterium afermentans
gggttgggccaccgcttcag

SEQ ID NO: 45512 - DNA, 20 bp, Gemella haemolysans
gtgttggtctcataagagat

SEQ ID NO: 45513 - DNA, 20 bp, Bacteroides fragilis
taaacttcttttatataaga

SEQ ID NO: 45514 - DNA, 20 bp, Prevotella oralis
gtgatgtgcagcgcgaactg

SEQ ID NO: 45515 - DNA, 20 bp, Budvicia aquatica
tttggaggttgtgggcatga

SEQ ID NO: 45516 - DNA, 20 bp, Bacteroides uniformis
tgcaactgaatgatgtggag

SEQ ID NO: 45517 - DNA, 20 bp, Chromobacterium violaceum
acgagcagccgacgtctgat

SEQ ID NO: 45518 - DNA, 20 bp, Streptococcus constellatus
tttactacaccgtattctgt

SEQ ID NO: 45519 - DNA, 20 bp, Bacteroides vulgatus
aggcatctgtgaaggtgctg

SEQ ID NO: 45520 - DNA, 20 bp, Cardiobacterium hominis
aaggcagctttctgggtcga

SEQ ID NO: 45521 - DNA, 20 bp, Helcococcus ovis
aagagattaaagaaggaaag

SEQ ID NO: 45522 - DNA, 20 bp, Abiotrophia defectiva
agagaagaacagcgcataga

SEQ ID NO: 45523 - DNA, 20 bp, Paenibacillus macerans
ctaatgttagttgccagcac

SEQ ID NO: 45524 - DNA, 20 bp, Clostridium tetani
cgtaaaaccctgttttctgg

SEQ ID NO: 45525 - DNA, 20 bp, Clostridium clostridiiforme
ctcaccaaaccgaagacggg

SEQ ID NO: 45526 - DNA, 20 bp, Bacteroides merdae
atgtaagctctacagcgaaa

SEQ ID NO: 45527 - DNA, 20 bp, Paenibacillus amylolyticus
gggagataatgaaagacgga

SEQ ID NO: 45528 - DNA, 20 bp, Helcococcus kunzii
attaagtctgaatttaaagg

SEQ ID NO: 45529 - DNA, 20 bp, Turicella otitidis
atacactggatcgggctaga

SEQ ID NO: 45530 - DNA, 20 bp, Bacillus sp
ggtgacgcatgtggaacgag

SEQ ID NO: 45531 - DNA, 20 bp, Eubacterium moniliforme
ggatactaggtgtggggggc

SEQ ID NO: 45532 - DNA, 20 bp, Haemophilus segnis
tcggtagcgaggaaggcatt

SEQ ID NO: 45533 - DNA, 20 bp, Pasteurella multocida
aggaggaaagggtgggacct

SEQ ID NO: 45534 - DNA, 20 bp, Bacillus flexus
cgaactgattagaagcttgc

SEQ ID NO: 45535 - DNA, 20 bp, Bacteroides capilosus
gagtgctggagaggcaatcg

SEQ ID NO: 45536 - DNA, 20 bp, Serratia proteamaculans
tagtgtgttaatagcacatt

SEQ ID NO: 45537 - DNA, 20 bp, Gemella morbillorum
cctttaaggagggagccggt

SEQ ID NO: 45538 - DNA, 20 bp, Streptococcus parasanguinis
aatgcatcactaagagatgg

SEQ ID NO: 45539 - DNA, 20 bp, Alicyclobacillus acidocaldarius
gtttccaaagccatcccatg

SEQ ID NO: 45540 - DNA, 20 bp, Corynebacterium falsenii
ggaagaagccacttgtggtg

SEQ ID NO: 45541 - DNA, 20 bp, Campylobacter curvus
tagagatagaagagtgtctg

SEQ ID NO: 45542 - DNA, 20 bp, Kingella denitrificans
gaagtgttaataccactttt

SEQ ID NO: 45543 - DNA, 20 bp, Helcococcus kunzii
gtagatgaggggaaagtgga

SEQ ID NO: 45544 - DNA, 20 bp, Paenibacillus pabuli
agaactggaaagacggagca

SEQ ID NO: 45545 - DNA, 20 bp, Bacteroides uniformis
tgaatgatgtggagacatgt

SEQ ID NO: 45546 - DNA, 20 bp, Corynebacterium auris
gagcctcttccacggggttc

SEQ ID NO: 45547 - DNA, 20 bp, Pediococcus dextrinicus
ttgacatctagcgccaatcc

SEQ ID NO: 45548 - DNA, 20 bp, Bacillus schlegellii
cggagttcacacattaagca

SEQ ID NO: 45549 - DNA, 20 bp, Streptococcus dysgalactiae
gacatcctcctgaccggtct

SEQ ID NO: 45550 - DNA, 20 bp, Acinetobacter lwoffii
tagggatagtggacgttact

SEQ ID NO: 45551 - DNA, 20 bp, Bacteroides capilosus
gatactaggtgtggggggac

SEQ ID NO: 45552 - DNA, 20 bp, Geobacillus thermoglucosidasius
cgagcggaccgggcgggagc

SEQ ID NO: 45553 - DNA, 20 bp, Clostridium sporogenes
ataccgcataacataagaga

SEQ ID NO: 45554 - DNA, 20 bp, Corynebacterium jeikeium
cccgcccgtcgcgtcatgaa

SEQ ID NO: 45555 - DNA, 20 bp, Finegoldia magna
gtagactgccgatgacaaat

SEQ ID NO: 45556 - DNA, 20 bp, Atopobium parvulum
atgggtagctgggttgagag

SEQ ID NO: 45557 - DNA, 20 bp, Pseudomonas luteola
gttgtaacctaatacgttgc

SEQ ID NO: 45558 - DNA, 20 bp, Oligella urethralis
ttagcctaagacttttcttc

SEQ ID NO: 45559 - DNA, 20 bp, Dermacoccus nishinomiyaensis
ccgcatggagtgttggtgga

SEQ ID NO: 45560 - DNA, 20 bp, Bacillus fusiformis
ggctgtcgctataggatggg

SEQ ID NO: 45561 - DNA, 20 bp, Salmonella enteritidis
ttgacatccacagaagaatc

SEQ ID NO: 45562 - DNA, 20 bp, Pediococcus pentosaceus
tgctaataccgtataacaga

SEQ ID NO: 45563 - DNA, 20 bp, Neisseria meningitidis
tcttgagagagaaagcaggg

SEQ ID NO: 45564 - DNA, 20 bp, Virgibacillus pantothenticus
ccttcgggggtgacgcttgt

SEQ ID NO: 45565 - DNA, 20 bp, Facklamia hominis
gaccgctagagtaactgtta

SEQ ID NO: 45566 - DNA, 20 bp, Bacillus alcalophilus
gaggggtcattggaaactgg

SEQ ID NO: 45567 - DNA, 20 bp, Anaerococcus prevotii
gatgttcagttaagtctggc

SEQ ID NO: 45568 - DNA, 20 bp, Streptococcus suis
tacttgaaaggagcaattgc

SEQ ID NO: 45569 - DNA, 20 bp, Clostridium tetani
agagtacaggagagggaaac

SEQ ID NO: 45570 - DNA, 20 bp, Bacteroides forsythus
ctaccgggcgaccggatgcc

SEQ ID NO: 45571 - DNA, 20 bp, Enterococcus cecorum
agagtggaaagttcatccct

SEQ ID NO: 45572 - DNA, 20 bp, Clostridium glycolicum
gtaacctgcctcatacacat

SEQ ID NO: 45573 - DNA, 20 bp, Corynebacterium coyleae
gagggtgtgctaatcgctga

SEQ ID NO: 45574 - DNA, 20 bp, Bacillus firmus
atgaggaaaagctgaaagat

SEQ ID NO: 45575 - DNA, 20 bp, Prevotella intermedia
cccgctgttagcgcctggcg

SEQ ID NO: 45576 - DNA, 20 bp, Streptococcus macacae
gtgccatttctagagatagg

SEQ ID NO: 45577 - DNA, 20 bp, Propionibacterium freudenreichii
tgggtcccttccacggggtc

SEQ ID NO: 45578 - DNA, 20 bp, Acinetobacter genospecies 3
tagctagcctaactgcaaag

SEQ ID NO: 45579 - DNA, 20 bp, Pediococcus pentosaceus
ggctctgctatcacttctgg

SEQ ID NO: 45580 - DNA, 20 bp, Bacillus sp
tacttgcttcccgcgctcga

SEQ ID NO: 45581 - DNA, 20 bp, Campylobacter coli
gttgttgctctgctagtcag

SEQ ID NO: 45582 - DNA, 20 bp, Weeksella virosa
tcgcttaacgatagaactgc

SEQ ID NO: 45583 - DNA, 20 bp, Propionibacterium freudenreichii
taactctgggcttgctttcg

SEQ ID NO: 45584 - DNA, 20 bp, Brevibacillus borstelensis
tggcgcaagctaccacttac

SEQ ID NO: 45585 - DNA, 20 bp, Corynebacterium amycolatum
ccatggtgtggatgctgtgg

SEQ ID NO: 45586 - DNA, 20 bp, Bacteroides capilosus
acagtccgaaaggactgcta

SEQ ID NO: 45587 - DNA, 20 bp, Bacteroides thetaiotaomicron
cgtaaggcaaatgtgaaggt

SEQ ID NO: 45588 - DNA, 20 bp, Peptostreptococcus anaerobius
tggcgtcgataactggggtg

SEQ ID NO: 45589 - DNA, 20 bp, Staphylococcus capitis
atacgtcctcccttgtggtt

SEQ ID NO: 45590 - DNA, 20 bp, Streptococcus parasanguinis
cggaggagttgcgaacgggt

SEQ ID NO: 45591 - DNA, 20 bp, Haemophilus haemolyticus
tgcgggaccgcaaggccgca

SEQ ID NO: 45592 - DNA, 20 bp, Weeksella virosa
tgactggatgcgaatctcta

SEQ ID NO: 45593 - DNA, 20 bp, Peptoniphilus indolicus
agcggtcaaagatggactcg

SEQ ID NO: 45594 - DNA, 20 bp, Tissierella praeacuta
ccatttggaggcagctgtcg

SEQ ID NO: 45595 - DNA, 20 bp, Gemella morbillorum
actagaaaaacttagcggcg

SEQ ID NO: 45596 - DNA, 20 bp, Cardiobacterium hominis
gaaagaggaaagcggaattt

SEQ ID NO: 45597 - DNA, 20 bp, Bacteroides uniformis
tagttcttccgcatggtaga

SEQ ID NO: 45598 - DNA, 20 bp, Streptococcus constellatus
ccgcataagaacatttactg

SEQ ID NO: 45599 - DNA, 20 bp, Prevotella melaninogenica
tggggataaagtcaatcacg

SEQ ID NO: 45600 - DNA, 20 bp, Moraxella bovis
agcttgctagatatgattag

SEQ ID NO: 45601 - DNA, 20 bp, Prevotella denticola
ccactcgagtaccagtgcaa

SEQ ID NO: 45602 - DNA, 20 bp, Actinomyces bovis
ttggaacttagtggcgaacg

SEQ ID NO: 45603 - DNA, 20 bp, Myroides odoratus
agctgcctagggtaaaacct

SEQ ID NO: 45604 - DNA, 20 bp, Facklamia sourekii
tgttaagtgttggggggctt

SEQ ID NO: 45605 - DNA, 20 bp, Granulicatella elegans
ctaaaaccgcataggttctt

SEQ ID NO: 45606 - DNA, 20 bp, Neisseria flavescens
cgacagctgatgacggtacc

SEQ ID NO: 45607 - DNA, 20 bp, Bacteroides uniformis
gcttgctaagtttgatggcg

SEQ ID NO: 45608 - DNA, 20 bp, Anaerococcus prevotii
gcgtgagtaacctgccttgc

SEQ ID NO: 45609 - DNA, 20 bp, Moraxella  catarrhalis
agtgagaatcttgcagagat

SEQ ID NO: 45610 - DNA, 20 bp, Oligella urethralis
agatggctcgatcagggttc

SEQ ID NO: 45611 - DNA, 20 bp, Clostridium botulinum
taacctgggggctgcattcc

SEQ ID NO: 45612 - DNA, 20 bp, Streptococcus thermophilus
aacgctgaagagaggagctt

SEQ ID NO: 45613 - DNA, 20 bp, Enterococcus casseliflavus
aagttgaaaggcgcttttgc

SEQ ID NO: 45614 - DNA, 20 bp, Bacillus fusiformis
agtacagtagtaactggctg

SEQ ID NO: 45615 - DNA, 20 bp, Peptostreptococcus anaerobius
atgacggtaccctgtgagga

SEQ ID NO: 45616 - DNA, 20 bp, Aneurinibacillus thermoaerophilus
ctcccggtctgacggtacct

SEQ ID NO: 45617 - DNA, 20 bp, Prevotella melaninogenica
attgcagaggaaggatttag

SEQ ID NO: 45618 - DNA, 20 bp, Alcaligenes faecalis
gatttggccgtgctcgcaag

SEQ ID NO: 45619 - DNA, 20 bp, Corynebacterium accolens
ggaaccatctttagtgtggt

SEQ ID NO: 45620 - DNA, 20 bp, Tetragenococcus halophilus
cactgatggctggtcccgcg

SEQ ID NO: 45621 - DNA, 20 bp, Gemella bergeri
caatctcataaaactattct

SEQ ID NO: 45622 - DNA, 20 bp, Propionibacterium freudenreichii
ttgtaggcggttgatcacgt

SEQ ID NO: 45623 - DNA, 20 bp, Fusobacterium mortiferum
tatgtgagtttcgcatgaaa

SEQ ID NO: 45624 - DNA, 20 bp, Salmonella enteritidis
agaagaatccagagatggat

SEQ ID NO: 45625 - DNA, 20 bp, Fusobacterium varium
gtacagagagctgcaaacct

SEQ ID NO: 45626 - DNA, 20 bp, Corynebacterium afermentans
ctttccagctactgaccatg

SEQ ID NO: 45627 - DNA, 19 bp, Weeksella virosa
ggagctacctagggtaaaa

SEQ ID NO: 45628 - DNA, 20 bp, Fusobacterium mortiferum
tgccaaactagagtactgga

SEQ ID NO: 45629 - DNA, 20 bp, Bacteroides distasonis
cacgtctcagttcggatcgg

SEQ ID NO: 45630 - DNA, 20 bp, Staphylococcus carnosus
taggtaactatgcgcacctt

SEQ ID NO: 45631 - DNA, 20 bp, Corynebacterium accolens
taccgcataagagtagatgt

SEQ ID NO: 45632 - DNA, 20 bp, Campylobacter sputorum
ccttctagagatagaagttt

SEQ ID NO: 45633 - DNA, 20 bp, Bacillus simplex
tacgttcttttctcgcatga

SEQ ID NO: 45634 - DNA, 20 bp, Enterobacter gergoviae
ggaagggagtgaggttaata

SEQ ID NO: 45635 - DNA, 20 bp, Haemophilus actinemycetemcomitans
aaattgacgttaaatacaga

SEQ ID NO: 45636 - DNA, 20 bp, Neisseria weaveri
agaaaaggttgtggctaata

SEQ ID NO: 45637 - DNA, 20 bp, Pantoea dispersa
acagaagagcttgctctttg

SEQ ID NO: 45638 - DNA, 20 bp, Leuconostoc argentinum
attctagttcgacggtacca

SEQ ID NO: 45639 - DNA, 20 bp, Corynebacterium urealyticum
aggaccaatctttagtgtgg

SEQ ID NO: 45640 - DNA, 20 bp, Clostridium botulinum
aggtgtagggggtatcaact

SEQ ID NO: 45641 - DNA, 20 bp, Burkholderia gladioli
ggaatcctggagagatctgg

SEQ ID NO: 45642 - DNA, 20 bp, Tissierella praeacuta
taacagataagctgagcact

SEQ ID NO: 45643 - DNA, 20 bp, Neisseria lactamica
ttgcgctatccgagcggccg

SEQ ID NO: 45644 - DNA, 20 bp, Cardiobacterium hominis
ttaacttaggagggcgcttg

SEQ ID NO: 45645 - DNA, 20 bp, Streptococcus constellatus
acgcacaggatgcaccgtag

SEQ ID NO: 45646 - DNA, 20 bp, Actinomyces bovis
ggcggatacaggtggtgcat

SEQ ID NO: 45647 - DNA, 20 bp, Moraxella osloensis
catgggagtctattgcacca

SEQ ID NO: 45648 - DNA, 20 bp, Empedobacter brevis
agtacagagggcagctactt

SEQ ID NO: 45649 - DNA, 20 bp, Corynebacterium accolens
tgagggtctttctacgactt

SEQ ID NO: 45650 - DNA, 20 bp, Clostridium clostridiiforme
gcacagggccgcatggtctg

SEQ ID NO: 45651 - DNA, 20 bp, Streptococcus acidominimus
aaaaggagcaacagcttcac

SEQ ID NO: 45652 - DNA, 20 bp, Campylobacter lari
tgttaaactgcttgagaaac

SEQ ID NO: 45653 - DNA, 20 bp, Alicyclobacillus acidocaldarius
tcactcggtaccgtctcgca

SEQ ID NO: 45654 - DNA, 20 bp, Haemophilus segnis
tttaatagactaggtgattg

SEQ ID NO: 45655 - DNA, 20 bp, Prevotella oris
tggtgaccaagcgaaagcat

SEQ ID NO: 45656 - DNA, 20 bp, Paenibacillus pabuli
gcgaggtggaacgaatccta

SEQ ID NO: 45657 - DNA, 20 bp, Campylobacter sputorum
agagatagaagtttcccctt

SEQ ID NO: 45658 - DNA, 20 bp, Streptococcus suis
ttctcttcggagcatcggtg

SEQ ID NO: 45659 - DNA, 20 bp, Bacillus sp
gggctaatactggataactt

SEQ ID NO: 45660 - DNA, 20 bp, Corynebacterium glucuronolyticum
tgaggagcgagagcatgggt

SEQ ID NO: 45661 - DNA, 20 bp, Corynebacterium glucuronolyticum
tgacatatgtgagattgggc

SEQ ID NO: 45662 - DNA, 20 bp, Capnocytophaga gingivalis
aggtttcagcttaactgaga

SEQ ID NO: 45663 - DNA, 20 bp, Pediococcus dextrinicus
acgttcccttcggggacgct

SEQ ID NO: 45664 - DNA, 20 bp, Lactococcus garvieae
tgatgatcccgcgttgtatt

SEQ ID NO: 45665 - DNA, 20 bp, Comamonas testosteroni
tgtacggaacgaaaagcctg

SEQ ID NO: 45666 - DNA, 20 bp, Aerococcus urinae
tggagagtaactgctccagt

SEQ ID NO: 45667 - DNA, 20 bp, Cellulosimicrobium cellulans
gacttcgggataactccggg

SEQ ID NO: 45668 - DNA, 20 bp, Kingella kingae
aagtagatagggtaaccgca

SEQ ID NO: 45669 - DNA, 20 bp, Bacillus sp
cttgacatcctctgacggcc

SEQ ID NO: 45670 - DNA, 20 bp, Dermabacter hominis
cgatggcccaagctttatgc

SEQ ID NO: 45671 - DNA, 20 bp, Aerococcus christensenii
ttcaaagttagcggcggacg

SEQ ID NO: 45672 - DNA, 20 bp, Paenibacillus peoriae
tgcttctaaacaacctagcg

SEQ ID NO: 45673 - DNA, 20 bp, Leuconostoc lactis
acctaacaccgcatggtgta

SEQ ID NO: 45674 - DNA, 20 bp, Chromobacterium violaceum
cgtgtaatgggggatagctc

SEQ ID NO: 45675 - DNA, 20 bp, Bacillus badius
tccgtaccttgacggtacct

SEQ ID NO: 45676 - DNA, 20 bp, Actinomyces naeslundii
tccggagacggggtttcctc

SEQ ID NO: 45677 - DNA, 20 bp, Clostridium butyricum
accgcatggtacagcaatta

SEQ ID NO: 45678 - DNA, 20 bp, Streptococcus thermophilus
tggatcctttccgggattca

SEQ ID NO: 45679 - DNA, 20 bp, Aerococcus christensenii
ctatcacttatcgatggcct

SEQ ID NO: 45680 - DNA, 20 bp, Neisseria cinerea
gggtccgcttaccacggtat

SEQ ID NO: 45681 - DNA, 20 bp, Neisseria elongata
tatattggaacgtaccgggt

SEQ ID NO: 45682 - DNA, 20 bp, Kocuria varians
cttcccccttgtggggctgg

SEQ ID NO: 45683 - DNA, 20 bp, Paenibacillus pabuli
ttctctgatggttagcggcg

SEQ ID NO: 45684 - DNA, 20 bp, Comamonas testosteroni
tcgggccttgtgctactaga

SEQ ID NO: 45685 - DNA, 20 bp, Bacillus pallidus
aaaaaaccactctcagttcg

SEQ ID NO: 45686 - DNA, 20 bp, Paenibacillus validus
ggaagaacgcctcggagagt

SEQ ID NO: 45687 - DNA, 20 bp, Haemophilus influenzae
ttaatagcacatcaaattga

SEQ ID NO: 45688 - DNA, 20 bp, Staphylococcus condimenti
atgccggataatatgcggaa

SEQ ID NO: 45689 - DNA, 20 bp, Propionibacterium freudenreichii
atggaactctcggtggagcg

SEQ ID NO: 45690 - DNA, 20 bp, Gemella bergeri
gctaacactataagatggct

SEQ ID NO: 45691 - DNA, 20 bp, Propionibacterium freudenreichii
tggtaatcccgaatatgagc

SEQ ID NO: 45692 - DNA, 20 bp, Peptoniphilus indolicus
atgtcataacgatcaaagtg

SEQ ID NO: 45693 - DNA, 20 bp, Propionibacterium freudenreichii
cgtccaatgttgccagcagt

SEQ ID NO: 45694 - DNA, 20 bp, Propionibacterium freudenreichii
actctcggtggagcggtgga

SEQ ID NO: 45695 - DNA, 20 bp, Vibrio hollisae
gagtaatgcgtcggaacgtg

SEQ ID NO: 45696 - DNA, 20 bp, Oligella ureolytica
accacttttctcaacgaaga

SEQ ID NO: 45697 - DNA, 20 bp, Bacillus fusiformis
gtagtaactggctgtacctt

SEQ ID NO: 45698 - DNA, 20 bp, Paenibacillus pabuli
atgtacctttccttcgggac

SEQ ID NO: 45699 - DNA, 20 bp, Pediococcus dextrinicus
agcgccaatcctagagatag

SEQ ID NO: 45700 - DNA, 20 bp, Peptoniphilus indolicus
cccttcggggacagtattac

SEQ ID NO: 45701 - DNA, 20 bp, Bacillus sp
taacttttctctccgcatgg

SEQ ID NO: 45702 - DNA, 20 bp, Tissierella praeacuta
tgtcgaaggtagggtcaatg

SEQ ID NO: 45703 - DNA, 20 bp, Corynebacterium urealyticum
cgggcaagctggagtgctgt

SEQ ID NO: 45704 - DNA, 20 bp, Anaerococcus prevotii
tcggggtgaagataagatgg

SEQ ID NO: 45705 - DNA, 20 bp, Corynebacterium glucuronolyticum
acctgggcttgacatatgtg

SEQ ID NO: 45706 - DNA, 20 bp, Photobacterium damselae
ggggaacgttaagggcggcg

SEQ ID NO: 45707 - DNA, 20 bp, Paenibacillus azotofixans
cagcaggtagagctgggcac

SEQ ID NO: 45708 - DNA, 20 bp, Clostridium septicum
caagtacaacgagatgcaat

SEQ ID NO: 45709 - DNA, 20 bp, Campylobacter concisus
tgcttgcactgggtggatga

SEQ ID NO: 45710 - DNA, 20 bp, Aerococcus viridans
ttatagatgaccttgcggtg

SEQ ID NO: 45711 - DNA, 20 bp, Porphyromonas endodontalis
tgaatactagatttttgcga

SEQ ID NO: 45712 - DNA, 20 bp, Streptococcus constellatus
ataagaacatttactgcatg

SEQ ID NO: 45713 - DNA, 20 bp, Haemophilus segnis
gaggaaggcatttagtttaa

SEQ ID NO: 45714 - DNA, 20 bp, Bacillus mycoides
ttttgaactgcatagttcga

SEQ ID NO: 45715 - DNA, 20 bp, Pediococcus damnosus
tcaccaaggctgtgatacgt

SEQ ID NO: 45716 - DNA, 20 bp, Brevundimonas diminuta
ggcgcgtaggcggatcgtta

SEQ ID NO: 45717 - DNA, 20 bp, Turicella otitidis
aggtgtgagggtcttttcac

SEQ ID NO: 45718 - DNA, 20 bp, Peptoniphilus indolicus
gaacaaagagcgggcaagct

SEQ ID NO: 45719 - DNA, 20 bp, Proteus penneri
agaggttgtggtcttgaacc

SEQ ID NO: 45720 - DNA, 20 bp, Corynebacterium glucuronolyticum
taggaccgcatcgtggttgg

SEQ ID NO: 45721 - DNA, 20 bp, Helcococcus ovis
gttgtcgggagtcaaatctc

SEQ ID NO: 45722 - DNA, 20 bp, Streptococcus constellatus
gcataagaacatttactgca

SEQ ID NO: 45723 - DNA, 20 bp, Streptococcus hyovaginalis
gcgaagaacgggagtaagag

SEQ ID NO: 45724 - DNA, 20 bp, Bacillus alcalophilus
atcaaaggaatcacatggtt

SEQ ID NO: 45725 - DNA, 20 bp, Leptotrichia buccalis
gccctggaaactgtttggct

SEQ ID NO: 45726 - DNA, 20 bp, Bacteroides vulgatus
tggatgccaatcccaaaaac

SEQ ID NO: 45727 - DNA, 20 bp, Clostridium limosum
gtgtcggggtttcaatactt

SEQ ID NO: 45728 - DNA, 20 bp, Cellulomonas turbata
tgcatggggagtgtctggaa

SEQ ID NO: 45729 - DNA, 20 bp, Porphyromonas endodontalis
cgaggaaggggcggatgacg

SEQ ID NO: 45730 - DNA, 20 bp, Chromobacterium violaceum
actagctgttgggggtttga

SEQ ID NO: 45731 - DNA, 20 bp, Leptotrichia buccalis
aaccgcaagcctgccctgga

SEQ ID NO: 45732 - DNA, 20 bp, Oligella ureolytica
ttctcaacgaagaaaagtct

SEQ ID NO: 45733 - DNA, 20 bp, Cardiobacterium hominis
ctagagtatgaaagaggaaa

SEQ ID NO: 45734 - DNA, 20 bp, Neisseria meningitidis
ctgacacactcgagtcaccc

SEQ ID NO: 45735 - DNA, 20 bp, Propionibacterium acnes
cttttgtggggtgctcgagt

SEQ ID NO: 45736 - DNA, 20 bp, Moraxella lacunata
ctcttgaagacttagtgacg

SEQ ID NO: 45737 - DNA, 20 bp, Prevotella melaninogenica
gagcgtaggccggagattaa

SEQ ID NO: 45738 - DNA, 20 bp, Bacteroides vulgatus
cacgcgagtggatgccaatc

SEQ ID NO: 45739 - DNA, 20 bp, Neisseria mucosa
accgcatatcttctgaggaa

SEQ ID NO: 45740 - DNA, 20 bp, Oligella urethralis
cgagatggctcgatcagggt

SEQ ID NO: 45741 - DNA, 20 bp, Peptostreptococcus anaerobius
ttagcctccgaaactggaag

SEQ ID NO: 45742 - DNA, 20 bp, Gemella bergeri
tgtagctaataccggataac

SEQ ID NO: 45743 - DNA, 20 bp, Tetragenococcus halophilus
tggggaacctatccatcagc

SEQ ID NO: 45744 - DNA, 20 bp, Corynebacterium glucuronolyticum
tgtgcgacaccgtgaggtgg

SEQ ID NO: 45745 - DNA, 20 bp, Clostridium clostridiiforme
caccaaaccgaagacgggta

SEQ ID NO: 45746 - DNA, 20 bp, Porphyromonas endodontalis
agctcaactgtagtcttgcc

SEQ ID NO: 45747 - DNA, 20 bp, Weeksella virosa
aacgatagaactgccattga

SEQ ID NO: 45748 - DNA, 20 bp, Anaerococcus prevotii
gctaggtatcggaataattc

SEQ ID NO: 45749 - DNA, 20 bp, Pasteurella multocida
tatatgcttggtgcccgaag

SEQ ID NO: 45750 - DNA, 20 bp, Corynebacterium pilosum
caccggatcgggctagagat

SEQ ID NO: 45751 - DNA, 20 bp, Pasteurella multocida
agtgcgagcttgagcgaatc

SEQ ID NO: 45752 - DNA, 20 bp, Fusobacterium mortiferum
ggatattatgtgagtttcgc

SEQ ID NO: 45753 - DNA, 20 bp, Streptococcus thoraltensis
tggtgacagtaagctaatct

SEQ ID NO: 45754 - DNA, 20 bp, Campylobacter rectus
agaattatgacggtacccaa

SEQ ID NO: 45755 - DNA, 20 bp, Gemella haemolysans
ccggataacagcattaactg

SEQ ID NO: 45756 - DNA, 20 bp, Staphylococcus carnosus
aggtgggacgaatgattggg

SEQ ID NO: 45757 - DNA, 20 bp, Bacteroides fragilis
gtaaaggatggggatgcgtt

SEQ ID NO: 45758 - DNA, 20 bp, Bacteroides thetaiotaomicron
attgcagttgatactggctg

SEQ ID NO: 45759 - DNA, 20 bp, Tissierella praeacuta
aaaggcttgagttaaggaga

SEQ ID NO: 45760 - DNA, 20 bp, Eggerthella lenta
ttcgacggtacctgcagaag

SEQ ID NO: 45761 - DNA, 20 bp, Peptostreptococcus anaerobius
atatatatttacggcatcgt

SEQ ID NO: 45762 - DNA, 20 bp, Leuconostoc lactis
cactctcgtttagattgaag

SEQ ID NO: 45763 - DNA, 20 bp, Streptococcus hyovaginalis
acacatgttaatgatttaaa

SEQ ID NO: 45764 - DNA, 20 bp, Gemella haemolysans
gatcagtgctgcagctaacg

SEQ ID NO: 45765 - DNA, 20 bp, Methylobacterium mesophilicum
ggtggcgcgcacacaggtgc

SEQ ID NO: 45766 - DNA, 20 bp, Arthrobacter globiformis
aaggcttgacatgttcctga

SEQ ID NO: 45767 - DNA, 20 bp, Bacteroides merdae
gcatgggaatatttgttaaa

SEQ ID NO: 45768 - DNA, 20 bp, Paenibacillus peoriae
cgagcggggttgtttagaag

SEQ ID NO: 45769 - DNA, 20 bp, Peptoniphilus indolicus
cttactggtcacaaactgac

SEQ ID NO: 45770 - DNA, 20 bp, Veillonella atypica
agagatggttcctcttcttc

SEQ ID NO: 45771 - DNA, 20 bp, Proteus vulgaris
gggaggaaggtgataaagtt

SEQ ID NO: 45772 - DNA, 20 bp, Paenibacillus glucanolyticus
atccctctgaatctgctaga

SEQ ID NO: 45773 - DNA, 20 bp, Tissierella praeacuta
ttcttcggaatgaaacttta

SEQ ID NO: 45774 - DNA, 20 bp, Bacteroides vulgatus
gggggtacagagggccgcta

SEQ ID NO: 45775 - DNA, 20 bp, Corynebacterium accolens
ggagcttgcttctctggatg

SEQ ID NO: 45776 - DNA, 20 bp, Streptococcus dysgalactiae
ccatgtgacggtaactaacc

SEQ ID NO: 45777 - DNA, 20 bp, Neisseria gonorrhoeae
cagggaagcttgcttctcgg

SEQ ID NO: 45778 - DNA, 20 bp, Bordetella bronchiseptica
aacggcacgggctaatatcc

SEQ ID NO: 45779 - DNA, 20 bp, Streptococcus thermophilus
agcttgctcttcttggatga

SEQ ID NO: 45780 - DNA, 20 bp, Dietzia maris
caccggaaaaccgtagagat

SEQ ID NO: 45781 - DNA, 20 bp, Streptococcus thoraltensis
atgacggtagcttatcagaa

SEQ ID NO: 45782 - DNA, 20 bp, Campylobacter lari
aaactggtaatctagagtgg

SEQ ID NO: 45783 - DNA, 20 bp, Corynebacterium glucuronolyticum
gatctgccctgcactggggg

SEQ ID NO: 45784 - DNA, 20 bp, Kytococcus sedentarius
ttaaccctggacgtgcagtg

SEQ ID NO: 45785 - DNA, 20 bp, Alicyclobacillus acidocaldarius
cccccatgccgctctccccg

SEQ ID NO: 45786 - DNA, 20 bp, Leptotrichia buccalis
taaagaacttgccctgcaga

SEQ ID NO: 45787 - DNA, 20 bp, Facklamia hominis
ccttttgcgggggataacca

SEQ ID NO: 45788 - DNA, 20 bp, Lactococcus lactis
aataccgcataaaaacttta

SEQ ID NO: 45789 - DNA, 20 bp, Moraxella atlantae
ttatagagggggatagctcg

SEQ ID NO: 45790 - DNA, 20 bp, Anaerococcus prevotii
cggaaatgcaagtcaggtgt

SEQ ID NO: 45791 - DNA, 20 bp, Leptotrichia buccalis
acggaactgcacgagtagag

SEQ ID NO: 45792 - DNA, 20 bp, Campylobacter lari
acaagttgagtagggaaagt

SEQ ID NO: 45793 - DNA, 20 bp, Bacteroides ovatus
aactggcagtcttgagtaca

SEQ ID NO: 45794 - DNA, 20 bp, Lactococcus garvieae
gcgcttcctaaggtaagacc

SEQ ID NO: 45795 - DNA, 20 bp, Streptococcus porcinus
atctacttaaaaggggcaac

SEQ ID NO: 45796 - DNA, 20 bp, Vibrio cholerae
taacttaaccaccttcctcc

SEQ ID NO: 45797 - DNA, 20 bp, Streptococcus equi
tcttagagataagaagttac

SEQ ID NO: 45798 - DNA, 20 bp, Paenibacillus thiaminolyticus
gggctcaactccgggtcgca

SEQ ID NO: 45799 - DNA, 20 bp, Bacillus lentus
aggtaccggcatttcctccg

SEQ ID NO: 45800 - DNA, 20 bp, Bacillus coagulans
gccggggaagaacaagtgcc

SEQ ID NO: 45801 - DNA, 20 bp, Bacillus simplex
atggaaagacggtttacgct

SEQ ID NO: 45802 - DNA, 20 bp, Bacillus sp
cttttctctccgcatggaga

SEQ ID NO: 45803 - DNA, 20 bp, Corynebacterium afermentans
cctcagcgtcagttcggccc

SEQ ID NO: 45804 - DNA, 20 bp, Clostridium botulinum
aatggtaggtacaataagac

SEQ ID NO: 45805 - DNA, 20 bp, Moraxella osloensis
aatacccattagattagacg

SEQ ID NO: 45806 - DNA, 20 bp, Anaerococcus prevotii
agtcttgacatattacggcg

SEQ ID NO: 45807 - DNA, 20 bp, Tissierella praeacuta
caaagcgtaaagcggtaaaa

SEQ ID NO: 45808 - DNA, 20 bp, Pseudoramibacter alactolyticus
gaagcctgtgagagaaccgc

SEQ ID NO: 45809 - DNA, 20 bp, Clostridium limosum
tcggggtttcaatacttcgg

SEQ ID NO: 45810 - DNA, 20 bp, Clostridium butyricum
gtgagcaaaactataaaacc

SEQ ID NO: 45811 - DNA, 20 bp, Alcaligenes faecalis
ttttggcagagaagaaaagg

SEQ ID NO: 45812 - DNA, 20 bp, Paenibacillus validus
ctgaaaactgggagacttga

SEQ ID NO: 45813 - DNA, 20 bp, Lactococcus lactis
ctttaaacacaagttttaag

SEQ ID NO: 45814 - DNA, 20 bp, Granulicatella adiacens
ctggtcaatctagtggcgaa

SEQ ID NO: 45815 - DNA, 20 bp, Streptococcus parasanguinis
tggtgcttgcaccgagcgga

SEQ ID NO: 45816 - DNA, 20 bp, Morganella morganii
tcgcaccatcagatgaaccc

SEQ ID NO: 45817 - DNA, 20 bp, Actinomyces bovis
tatcaagtttatggttaaag

SEQ ID NO: 45818 - DNA, 20 bp, Paenibacillus macerans
aatcctatcaaagctggtct

SEQ ID NO: 45819 - DNA, 20 bp, Yersinia enterocolitica
acgttgttggattgacgtta

SEQ ID NO: 45820 - DNA, 20 bp, Fusobacterium mortiferum
ggtgatggtggcggacgggt

SEQ ID NO: 45821 - DNA, 20 bp, Eggerthella lenta
agacggcaagggatggggtc

SEQ ID NO: 45822 - DNA, 20 bp, Prevotella melaninogenica
ttgcagaggaaggatttaga

SEQ ID NO: 45823 - DNA, 20 bp, Eggerthella lenta
cagcctgctgggccgcaact

SEQ ID NO: 45824 - DNA, 20 bp, Leptotrichia buccalis
acggtaactgacgctgaagt

SEQ ID NO: 45825 - DNA, 20 bp, Lactococcus raffinolactis
aagcggctctctggactgtc

SEQ ID NO: 45826 - DNA, 20 bp, Kocuria kristinae
atacaccggatcgttccaga

SEQ ID NO: 45827 - DNA, 20 bp, Micrococcus luteus
gcttgacatgttctcgatcg

SEQ ID NO: 45828 - DNA, 20 bp, Staphylococcus muscae
tgaccgcactagagatagtg

SEQ ID NO: 45829 - DNA, 20 bp, Bacteroides fragilis
acttcttttatataagaata

SEQ ID NO: 45830 - DNA, 20 bp, Bacillus coagulans
gtgagtgaagaaggccttcg

SEQ ID NO: 45831 - DNA, 20 bp, Corynebacterium glucuronolyticum
tctggtgtgggatgagcttg

SEQ ID NO: 45832 - DNA, 20 bp, Propionibacterium freudenreichii
atgtaggggagaatggaact

SEQ ID NO: 45833 - DNA, 20 bp, Weeksella virosa
acatgcgtaagattagatag

SEQ ID NO: 45834 - DNA, 20 bp, Bacteroides thetaiotaomicron
ccgatggtataatcagaccg

SEQ ID NO: 45835 - DNA, 20 bp, Bacteroides capilosus
  misc_feature (9)..(9): n is a, c, g, or t
acggtactngatgaataagc

SEQ ID NO: 45836 - DNA, 20 bp, Pasteurella trehalosi
agacaaagcaattgacgtta

SEQ ID NO: 45837 - DNA, 20 bp, Vibrio cholerae
gtctccgctagattctctgg

SEQ ID NO: 45838 - DNA, 20 bp, Enterococcus cecorum
tttcaccgtagcttgctaca

SEQ ID NO: 45839 - DNA, 20 bp, Streptococcus sp.
accgcataaaattgattatt

SEQ ID NO: 45840 - DNA, 20 bp, Prevotella melaninogenica
tcttcgatgacggcatcaga

SEQ ID NO: 45841 - DNA, 20 bp, Streptococcus anginosus
ataccgcataacagtatgta

SEQ ID NO: 45842 - DNA, 20 bp, Pediococcus parvulus
ttcggggacggaatgacagg

SEQ ID NO: 45843 - DNA, 20 bp, Streptococcus porcinus
agacccatgtcatctactta

SEQ ID NO: 45844 - DNA, 20 bp, Fusobacterium varium
cgtctaggcggtttagtaag

SEQ ID NO: 45845 - DNA, 20 bp, Clostridium clostridiiforme
ataacctgcctcacactggg

SEQ ID NO: 45846 - DNA, 20 bp, Clostridium botulinum
acttataaaacctatctcag

SEQ ID NO: 45847 - DNA, 20 bp, Leuconostoc pseudomesenteroides
tgacacaaagttaaaaggcg

SEQ ID NO: 45848 - DNA, 20 bp, Paenibacillus larvae
gcaacctgtcacttacagat

SEQ ID NO: 45849 - DNA, 20 bp, Bacteroides capilosus
ggcgtgtaggcgggactgca

SEQ ID NO: 45850 - DNA, 20 bp, Campylobacter sputorum
tagtcatggcagtaatccac

SEQ ID NO: 45851 - DNA, 20 bp, Alicyclobacillus acidocaldarius
catggactttcactccagac

SEQ ID NO: 45852 - DNA, 20 bp, Campylobacter rectus
tccagagatggaagagtgtc

SEQ ID NO: 45853 - DNA, 20 bp, Actinomyces viscosus
catggtgggcctgggaaagg

SEQ ID NO: 45854 - DNA, 20 bp, Peptoniphilus indolicus
caggcggtttagaaagtcag

SEQ ID NO: 45855 - DNA, 20 bp, Bacillus mycoides
gaactgcatagttcgaaatt

SEQ ID NO: 45856 - DNA, 20 bp, Serratia marcescens
gaggaggaaggtggtgagct

SEQ ID NO: 45857 - DNA, 20 bp, Streptococcus infantarius
taacatgggttaaatgctgt

SEQ ID NO: 45858 - DNA, 20 bp, Peptostreptococcus anaerobius
tgccctatacacatggataa

SEQ ID NO: 45859 - DNA, 20 bp, Bacteroides thetaiotaomicron
gcttgcaaactggagatggc

SEQ ID NO: 45860 - DNA, 20 bp, Prevotella disiens
gagtacacacaacgtaggcg

SEQ ID NO: 45861 - DNA, 20 bp, Methylobacterium mesophilicum
taccatcctttgacatggcg

SEQ ID NO: 45862 - DNA, 20 bp, Brochothrix campestris
atgtgctgaacatcataaga

SEQ ID NO: 45863 - DNA, 20 bp, Arthrobacter globiformis
acatggaccggaccgccgca

SEQ ID NO: 45864 - DNA, 20 bp, Fusobacterium nucleatum
taaggcatcttagaattatg

SEQ ID NO: 45865 - DNA, 20 bp, Actinomyces bovis
gctaactggcctgtaactga

SEQ ID NO: 45866 - DNA, 20 bp, Methylobacterium mesophilicum
atggcgtgttacccagagag

SEQ ID NO: 45867 - DNA, 20 bp, Proteus mirabilis
gtgataaggttaataccctt

SEQ ID NO: 45868 - DNA, 20 bp, Anaerococcus prevotii
tcgcaggcggaaatgcaagt

SEQ ID NO: 45869 - DNA, 20 bp, Tissierella praeacuta
catgagatttaagtcaaagc

SEQ ID NO: 45870 - DNA, 20 bp, Kingella kingae
agttaagcaagatgtgaaat

SEQ ID NO: 45871 - DNA, 20 bp, Campylobacter concisus
ccagtggcctgtcaaaggga

SEQ ID NO: 45872 - DNA, 20 bp, Pseudoramibacter alactolyticus
gactcagcagtcgaaggtgg

SEQ ID NO: 45873 - DNA, 20 bp, Peptoniphilus indolicus
gcgggcaagctagcgatagc

SEQ ID NO: 45874 - DNA, 20 bp, Facklamia ignava
atcagagaagaatagcctgt

SEQ ID NO: 45875 - DNA, 20 bp, Anaerococcus prevotii
cagttaagtctggcaacgag

SEQ ID NO: 45876 - DNA, 20 bp, Moraxella lacunata
agttaccagcgatttaagtc

SEQ ID NO: 45877 - DNA, 20 bp, Neisseria meningitidis
agagagaaagcaggggactt

SEQ ID NO: 45878 - DNA, 20 bp, Pediococcus pentosaceus
cgtataacagagaaaaccgc

SEQ ID NO: 45879 - DNA, 20 bp, Helcococcus kunzii
atgcaagttgaacgagaatt

SEQ ID NO: 45880 - DNA, 20 bp, Lactococcus garvieae
gtagtgtaaaggactaccaa

SEQ ID NO: 45881 - DNA, 20 bp, Arthrobacter globiformis
aagatttattggtcttggat

SEQ ID NO: 45882 - DNA, 20 bp, Bacteroides stercoris
cgtgtggctttttgtatgta

SEQ ID NO: 45883 - DNA, 20 bp, Shewanella algae
tgcctgggaatttgcccatt

SEQ ID NO: 45884 - DNA, 20 bp, Tetragenococcus halophilus
atgctttttctatgacggta

SEQ ID NO: 45885 - DNA, 20 bp, Leuconostoc pseudomesenteroides
atgaaacttagtgtcgcatg

SEQ ID NO: 45886 - DNA, 20 bp, Streptococcus equi
gaagttacttcggtacattg

SEQ ID NO: 45887 - DNA, 20 bp, Streptococcus thermophilus
aaaagtcgatatcgcatgat

SEQ ID NO: 45888 - DNA, 20 bp, Corynebacterium xerosis
gaccgcaccgtgagggtgtg

SEQ ID NO: 45889 - DNA, 20 bp, Leptotrichia buccalis
ctagccaaggcggacgggtg

SEQ ID NO: 45890 - DNA, 20 bp, Bacteroides distasonis
ccacctggcgacagggagcg

SEQ ID NO: 45891 - DNA, 20 bp, Neisseria meningitidis
catacgtcttgagagagaaa

SEQ ID NO: 45892 - DNA, 20 bp, Bacteroides uniformis
aacttagcttgctaagtttg

SEQ ID NO: 45893 - DNA, 20 bp, Prevotella oris
aactggtccacttgagtgtg

SEQ ID NO: 45894 - DNA, 20 bp, Gemella bergeri
aaaggttgtgtagtaactat

SEQ ID NO: 45895 - DNA, 20 bp, Leptotrichia buccalis
gaagctaatgcgataagtaa

SEQ ID NO: 45896 - DNA, 20 bp, Prevotella melaninogenica
cgctcaacgtctgacttgca

SEQ ID NO: 45897 - DNA, 20 bp, Anaerococcus tetradius
agagcgatctgaagcgaaac

SEQ ID NO: 45898 - DNA, 20 bp, Myroides odoratus
tttcggactgagtggctaag

SEQ ID NO: 45899 - DNA, 20 bp, Bacteroides thetaiotaomicron
aggcaaatgtgaaggtgctg

SEQ ID NO: 45900 - DNA, 20 bp, Prevotella oralis
gatgtgcagcgcgaactggg

SEQ ID NO: 45901 - DNA, 20 bp, Campylobacter curvus
ccaaaccggttatggtccac

SEQ ID NO: 45902 - DNA, 20 bp, Brochothrix campestris
tgcctcacagctggggataa

SEQ ID NO: 45903 - DNA, 20 bp, Corynebacterium glucuronolyticum
caatggctggtacagtgcgt

SEQ ID NO: 45904 - DNA, 20 bp, Arcanobacterium bernardiae
tgacatacactgcgatgtgc

SEQ ID NO: 45905 - DNA, 20 bp, Tissierella praeacuta
ttagcgataagatgctaatc

SEQ ID NO: 45906 - DNA, 20 bp, Bacteroides thetaiotaomicron
ctggagatggcgaccggcgc

SEQ ID NO: 45907 - DNA, 20 bp, Bacteroides forsythus
gagggataacccggcgaaag

SEQ ID NO: 45908 - DNA, 20 bp, Streptococcus acidominimus
ggagcaacagcttcactatg

SEQ ID NO: 45909 - DNA, 20 bp, Finegoldia magna
ccgtaaagcattggaaactg

SEQ ID NO: 45910 - DNA, 20 bp, Cellulomonas turbata
cgcccctgcatggggagtgt

SEQ ID NO: 45911 - DNA, 20 bp, Brevibacillus choshinensis
gagtgcgcgaatcccttaaa

SEQ ID NO: 45912 - DNA, 20 bp, Bacillus megaterium
ctccttcatgggagatgatt

SEQ ID NO: 45913 - DNA, 20 bp, Campylobacter rectus
aagtagcttgctatttaatc

SEQ ID NO: 45914 - DNA, 20 bp, Clostridium ramosum
tggtgaccgtattaaaagtg

SEQ ID NO: 45915 - DNA, 20 bp, Bacillus coagulans
catcctctgacctccctgga

SEQ ID NO: 45916 - DNA, 20 bp, Ochrobactrum intermedium
atctacccatcactagggaa

SEQ ID NO: 45917 - DNA, 20 bp, Campylobacter rectus
ggagattaagtagcttgcta

SEQ ID NO: 45918 - DNA, 20 bp, Aerococcus christensenii
cttagaaagatggctctgct

SEQ ID NO: 45919 - DNA, 20 bp, Abiotrophia defectiva
atgcgtgtgacggtatctaa

SEQ ID NO: 45920 - DNA, 20 bp, Neisseria meningitidis
gtcatcagccgctgatatta

SEQ ID NO: 45921 - DNA, 20 bp, Brevibacterium epidermidis
gttctggaaacagttcttct

SEQ ID NO: 45922 - DNA, 20 bp, Streptococcus constellatus
ccgtataagaacatttactg

SEQ ID NO: 45923 - DNA, 20 bp, Photobacterium damselae
acacctgcattatttgacgt

SEQ ID NO: 45924 - DNA, 20 bp, Clostridium paraputrificum
ttgtagcttcgcatgaagta

SEQ ID NO: 45925 - DNA, 20 bp, Vibrio cholerae
cactccagcgtctccgctag

SEQ ID NO: 45926 - DNA, 20 bp, Bacillus smithii
aggttgaaaggcggcgcaag

SEQ ID NO: 45927 - DNA, 20 bp, Anaerobiospirillum succiniciproducens
cggtaacagcagagagcttg

SEQ ID NO: 45928 - DNA, 20 bp, Comamonas terrigena
ttgggtcttaactgactcag

SEQ ID NO: 45929 - DNA, 20 bp, Brevibacillus choshinensis
agtcgagcggaccaatgaag

SEQ ID NO: 45930 - DNA, 20 bp, Streptococcus acidominimus
agaagtaaaaggctgtggct

SEQ ID NO: 45931 - DNA, 20 bp, Helcococcus kunzii
gcagctacctcgtgagagca

SEQ ID NO: 45932 - DNA, 20 bp, Ignavigranum ruoffiae
tcgtgagagcaagcgaatct

SEQ ID NO: 45933 - DNA, 20 bp, Moraxella osloensis
gtgctagaatatgtgagagg

SEQ ID NO: 45934 - DNA, 20 bp, Actinomyces bovis
gagccgtgcgaaggtaggat

SEQ ID NO: 45935 - DNA, 20 bp, Streptococcus parasanguinis
agcttggtgcttgcaccgag

SEQ ID NO: 45936 - DNA, 20 bp, Veillonella atypica
aatgggagttaatagacgga

SEQ ID NO: 45937 - DNA, 20 bp, Gemella haemolysans
agccggtcacggtgggacag

SEQ ID NO: 45938 - DNA, 20 bp, Anaerococcus prevotii
aggtatcggaataattcggt

SEQ ID NO: 45939 - DNA, 20 bp, Haemophilus haemolyticus
cgaaagtgcgggaccgcaag

SEQ ID NO: 45940 - DNA, 20 bp, Leptotrichia buccalis
aagcctgccctggaaactgt

SEQ ID NO: 45941 - DNA, 20 bp, Peptostreptococcus anaerobius
gaaggtggcgtcgataactg

SEQ ID NO: 45942 - DNA, 20 bp, Leptotrichia buccalis
agagtgctggagaggtggac

SEQ ID NO: 45943 - DNA, 20 bp, Pasteurella multocida
gtaatgtctacggactaaag

SEQ ID NO: 45944 - DNA, 20 bp, Corynebacterium urealyticum
tttagtgtggttggtggaaa

SEQ ID NO: 45945 - DNA, 20 bp, Tetragenococcus halophilus
tctatgacggtagctgacca

SEQ ID NO: 45946 - DNA, 20 bp, Helcococcus kunzii
agggtatgtaggcggttaat

SEQ ID NO: 45947 - DNA, 20 bp, Mannheimia haemolytica
ggtgggaccatttggccacc

SEQ ID NO: 45948 - DNA, 20 bp, Bacillus megaterium
ttctccttcatgggagatga

SEQ ID NO: 45949 - DNA, 20 bp, Paenibacillus pabuli
gttgttttcttcgcctgaag

SEQ ID NO: 45950 - DNA, 20 bp, Arcanobacterium bernardiae
tttcagtacagaacaaggcc

SEQ ID NO: 45951 - DNA, 20 bp, Bacteroides thetaiotaomicron
cccaccaagactacgatgga

SEQ ID NO: 45952 - DNA, 20 bp, Moraxella osloensis
gtcgaacgatgactctctag

SEQ ID NO: 45953 - DNA, 20 bp, Kingella denitrificans
ggaagtgttaataccacttt

SEQ ID NO: 45954 - DNA, 20 bp, Arcanobacterium bernardiae
cttttccacgggttctgcgc

SEQ ID NO: 45955 - DNA, 20 bp, Acinetobacter calcoaceticus
tgatggtgcttgcactatca

SEQ ID NO: 45956 - DNA, 20 bp, Capnocytophaga ochracea
tcttcggacagttttcaagg

SEQ ID NO: 45957 - DNA, 20 bp, Streptococcus equi
gttacttcggtacattggag

SEQ ID NO: 45958 - DNA, 20 bp, Prevotella denticola
ctgaattgcagcgcatactg

SEQ ID NO: 45959 - DNA, 20 bp, Lactococcus garvieae
gagaatcgcatgattcttat

SEQ ID NO: 45960 - DNA, 20 bp, Prevotella oris
agcgtaggccgtggattaag

SEQ ID NO: 45961 - DNA, 20 bp, Oligella ureolytica
gagccatcccgcgtgtggga

SEQ ID NO: 45962 - DNA, 20 bp, Chryseobacterium meningosepticum
gataggatgcaaatctcgaa

SEQ ID NO: 45963 - DNA, 20 bp, Corynebacterium group F
gtaagtccacagcttaactg

SEQ ID NO: 45964 - DNA, 20 bp, Bacteroides fragilis
atgtatactgttttgtatgt

SEQ ID NO: 45965 - DNA, 20 bp, Acinetobacter lwoffii
cgcgtaggtggccaattaag

SEQ ID NO: 45966 - DNA, 20 bp, Anaerococcus tetradius
ctatagtaagcttttaaaac

SEQ ID NO: 45967 - DNA, 20 bp, Brevibacillus choshinensis
gcatggtctgaaagggaaag

SEQ ID NO: 45968 - DNA, 20 bp, Corynebacterium glucuronolyticum
tggttggtgtggtggaaagg

SEQ ID NO: 45969 - DNA, 20 bp, Prevotella loescheii
ttatgccgggcactctggag

SEQ ID NO: 45970 - DNA, 20 bp, Actinomyces bovis
cagagatgtgtaatagttat

SEQ ID NO: 45971 - DNA, 20 bp, Paenibacillus amylolyticus
ttggttcgcactggaaactg

SEQ ID NO: 45972 - DNA, 20 bp, Oligella ureolytica
tcttaggctaataccttaag

SEQ ID NO: 45973 - DNA, 20 bp, Bacteroides merdae
ccttatcactagttactaac

SEQ ID NO: 45974 - DNA, 20 bp, Bacteroides distasonis
agctgaggactctggtggga

SEQ ID NO: 45975 - DNA, 20 bp, Prevotella oris
aggccgtggattaagcgtgt

SEQ ID NO: 45976 - DNA, 20 bp, Streptococcus suis
tcaccaaggcttcgatacat

SEQ ID NO: 45977 - DNA, 20 bp, Anaerobiospirillum succiniciproducens
gtgaggtggagtggaaccca

SEQ ID NO: 45978 - DNA, 20 bp, Actinomyces bovis
agttatggcggatacaggtg

SEQ ID NO: 45979 - DNA, 20 bp, Propionibacterium avidum
gagatgggtatgcctccttg

SEQ ID NO: 45980 - DNA, 20 bp, Tissierella praeacuta
gctgtcgaaggtagggtcaa

SEQ ID NO: 45981 - DNA, 20 bp, Brevibacillus parabrevis
ggataggtttttggattgca

SEQ ID NO: 45982 - DNA, 20 bp, Acinetobacter junii
ttgcaccttatcttagcggc

SEQ ID NO: 45983 - DNA, 20 bp, Bacteroides capilosus
attgttagttgctacgcaag

SEQ ID NO: 45984 - DNA, 20 bp, Arcanobacterium bernardiae
aacaaggcctttttggttga

SEQ ID NO: 45985 - DNA, 20 bp, Actinomyces naeslundii
gggatattctgggtctgtcg

SEQ ID NO: 45986 - DNA, 20 bp, Bacteroides uniformis
agaaggcagctacacggcga

SEQ ID NO: 45987 - DNA, 20 bp, Streptococcus dysgalactiae
cttgcaccggttcaaggagt

SEQ ID NO: 45988 - DNA, 20 bp, Fusobacterium mortiferum
tgaaattcatatgaaagcta

SEQ ID NO: 45989 - DNA, 20 bp, Propionibacterium avidum
gagctcgtaggtggttgatt

SEQ ID NO: 45990 - DNA, 20 bp, Campylobacter sputorum
gaggaacaacacttagaaat

SEQ ID NO: 45991 - DNA, 20 bp, Bacteroides stercoris
caccaaaccgacgatggata

SEQ ID NO: 45992 - DNA, 20 bp, Bacteroides thetaiotaomicron
ttccacgtgtggaattttgt

SEQ ID NO: 45993 - DNA, 20 bp, Moraxella osloensis
tattagatgagcctaaatca

SEQ ID NO: 45994 - DNA, 20 bp, Bacillus coagulans
acttggaggctgttcccctg

SEQ ID NO: 45995 - DNA, 20 bp, Corynebacterium falsenii
ctagggaagaagccacttgt

SEQ ID NO: 45996 - DNA, 20 bp, Corynebacterium afermentans
tccagacgtttcctctatat

SEQ ID NO: 45997 - DNA, 20 bp, Paenibacillus alvei
tgatgaagtgcttgcacttc

SEQ ID NO: 45998 - DNA, 20 bp, Shewanella algae
atgcctgggaatttgcccat

SEQ ID NO: 45999 - DNA, 20 bp, Prevotella melaninogenica
ggcattgagtgcttgcactc

SEQ ID NO: 46000 - DNA, 20 bp, Bacteroides forsythus
taagctctacagcgaaagcg

SEQ ID NO: 46001 - DNA, 20 bp, Moraxella osloensis
agaatatgtgagagggaagt

SEQ ID NO: 46002 - DNA, 20 bp, Brevibacillus brevis
gataacctccggaaacggaa

SEQ ID NO: 46003 - DNA, 20 bp, Streptococcus constellatus
tattctgtgagttgcgaacg

SEQ ID NO: 46004 - DNA, 20 bp, Finegoldia magna
tatgacagtgggatagcctc

SEQ ID NO: 46005 - DNA, 20 bp, Helcococcus ovis
gggaagagattaaagaagga

SEQ ID NO: 46006 - DNA, 20 bp, Clostridium subterminale
taaacttataaaaccaatcc

SEQ ID NO: 46007 - DNA, 20 bp, Enterobacter cloacae
ggggaggaaggcgacagggt

SEQ ID NO: 46008 - DNA, 20 bp, Ewingella americana
gtgggcttgacccgtggctt

SEQ ID NO: 46009 - DNA, 20 bp, Streptococcus constellatus
aagtagaccgcacaggatgc

SEQ ID NO: 46010 - DNA, 20 bp, Leuconostoc fallax
ctgtggaatggctttggaaa

SEQ ID NO: 46011 - DNA, 20 bp, Eggerthella lenta
gggctcaacccccggccgga

SEQ ID NO: 46012 - DNA, 20 bp, Clostridium limosum
ttcaatacttcggtgccgca

SEQ ID NO: 46013 - DNA, 20 bp, Propionibacterium avidum
tatgcctccttgtggggctg

SEQ ID NO: 46014 - DNA, 20 bp, Propionibacterium freudenreichii
tggaaagctttatgcggtca

SEQ ID NO: 46015 - DNA, 20 bp, Corynebacterium accolens
gtagatgttgcatgacattt

SEQ ID NO: 46016 - DNA, 20 bp, Pediococcus inopinatus
actataaagtgagtggcgaa

SEQ ID NO: 46017 - DNA, 20 bp, Campylobacter rectus
ctagtcgaggcagtaatgca

SEQ ID NO: 46018 - DNA, 20 bp, Brevibacterium epidermidis
aaacagttcttctctttgga

SEQ ID NO: 46019 - DNA, 20 bp, Streptococcus sobrinus
ctctgttgtaggggaagaac

SEQ ID NO: 46020 - DNA, 20 bp, Clostridium tetani
taggtgtaggagggtccaac

SEQ ID NO: 46021 - DNA, 20 bp, Nocardia asteroides
cctggccttgacatactaag

SEQ ID NO: 46022 - DNA, 20 bp, Fusobacterium mortiferum
ctgccaaactagagtactgg

SEQ ID NO: 46023 - DNA, 20 bp, Brevibacillus choshinensis
tacttctttcagaccgcatg

SEQ ID NO: 46024 - DNA, 20 bp, Bacteroides ureolyticus
ctcggctgagcactctaaac

SEQ ID NO: 46025 - DNA, 20 bp, Leptotrichia buccalis
gatgatgaagatagttcact

SEQ ID NO: 46026 - DNA, 20 bp, Veillonella atypica
tcttcttcggaagccagaaa

SEQ ID NO: 46027 - DNA, 20 bp, Vibrio cholerae
tgtcagtttcaaatgcgatt

SEQ ID NO: 46028 - DNA, 20 bp, Pediococcus pentosaceus
gctctgctatcacttctgga

SEQ ID NO: 46029 - DNA, 20 bp, Tissierella praeacuta
aaagaagatttcttcggaat

SEQ ID NO: 46030 - DNA, 20 bp, Brevibacillus borstelensis
agtatgccaatctcttaaaa

SEQ ID NO: 46031 - DNA, 20 bp, Corynebacterium accolens
gataggaaccatctttagtg

SEQ ID NO: 46032 - DNA, 20 bp, Clostridium botulinum
taggtacaataagacgcaag

SEQ ID NO: 46033 - DNA, 20 bp, Alcaligenes faecalis
ctctcttggcggcgagtggc

SEQ ID NO: 46034 - DNA, 20 bp, Aerococcus christensenii
aaggaacctaccgataagcg

SEQ ID NO: 46035 - DNA, 20 bp, Enterococcus raffinosus
gccttgctatcacttataga

SEQ ID NO: 46036 - DNA, 20 bp, Alcaligenes faecalis
gagaagaaaaggtacctcct

SEQ ID NO: 46037 - DNA, 20 bp, Leptotrichia buccalis
gggcatctaggcggccagac

SEQ ID NO: 46038 - DNA, 20 bp, Bacillus sp
atactggataacttttctct

SEQ ID NO: 46039 - DNA, 20 bp, Prevotella denticola
agcgtaggctggagattaag

SEQ ID NO: 46040 - DNA, 20 bp, Tetragenococcus halophilus
tgcggcaacccttaggggag

SEQ ID NO: 46041 - DNA, 20 bp, Prevotella oris
acgattcagagatgatgagg

SEQ ID NO: 46042 - DNA, 20 bp, Paenibacillus azotofixans
gtcgcactggaaactggaca

SEQ ID NO: 46043 - DNA, 20 bp, Bacteroides thetaiotaomicron
gtggaattttgtatgtacca

SEQ ID NO: 46044 - DNA, 20 bp, Bacteroides fragilis
ttatataagaataaagtgca

SEQ ID NO: 46045 - DNA, 20 bp, Morganella morganii
accatcagatgaacccatat

SEQ ID NO: 46046 - DNA, 20 bp, Cardiobacterium hominis
gagtatgaaagaggaaagcg

SEQ ID NO: 46047 - DNA, 20 bp, Comamonas terrigena
actagagcggccgatggcag

SEQ ID NO: 46048 - DNA, 20 bp, Actinomyces bovis
agcgcaggcggtttatcaag

SEQ ID NO: 46049 - DNA, 20 bp, Rothia mucilaginosa
tcagagatggtgtttccctt

SEQ ID NO: 46050 - DNA, 20 bp, Leuconostoc lactis
cgcatggtgtagggttgaaa

SEQ ID NO: 46051 - DNA, 20 bp, Eggerthella lenta
agaggagcgtccgcaggtgg

SEQ ID NO: 46052 - DNA, 20 bp, Bacillus coagulans
tctgacctccctggagacag

SEQ ID NO: 46053 - DNA, 20 bp, Helcococcus kunzii
gtctgaacaaagcgcagcta

SEQ ID NO: 46054 - DNA, 20 bp, Prevotella oris
tgatgaggcccttcggggcg

SEQ ID NO: 46055 - DNA, 20 bp, Granulicatella elegans
ggtgcttgcactggtcaatc

SEQ ID NO: 46056 - DNA, 20 bp, Bacteroides uniformis
tggagacatgtcagccgcaa

SEQ ID NO: 46057 - DNA, 20 bp, Campylobacter curvus
gtcttggcagtaatgcacct

SEQ ID NO: 46058 - DNA, 20 bp, Fusobacterium varium
ttggaaactgctaaactaga

SEQ ID NO: 46059 - DNA, 20 bp, Gemella bergeri
agaaaggttgtgtagtaact

SEQ ID NO: 46060 - DNA, 20 bp, Prevotella melaninogenica
ttcgatgacggcatcagatt

SEQ ID NO: 46061 - DNA, 20 bp, Morganella morganii
cgccatcagatgaacccata

SEQ ID NO: 46062 - DNA, 20 bp, Porphyromonas endodontalis
aagatttattgattacagat

SEQ ID NO: 46063 - DNA, 20 bp, Neisseria elongata
aatatattggaacgtaccgg

SEQ ID NO: 46064 - DNA, 20 bp, Porphyromonas maccae
gtatgcgatatacagtatgc

SEQ ID NO: 46065 - DNA, 20 bp, Facklamia ignava
aatagcctgtagagtaactg

SEQ ID NO: 46066 - DNA, 20 bp, Atopobium parvulum
tcgattgcacccgaagtcgt

SEQ ID NO: 46067 - DNA, 20 bp, Acinetobacter haemolyticus
cgatactggtcagctagagt

SEQ ID NO: 46068 - DNA, 20 bp, Corynebacterium glucuronolyticum
cgtgtgcgacaccgtgaggt

SEQ ID NO: 46069 - DNA, 20 bp, Veillonella dispar
cgggacgaaaggccttcttg

SEQ ID NO: 46070 - DNA, 20 bp, Aerococcus christensenii
taaggaacctaccgataagc

SEQ ID NO: 46071 - DNA, 20 bp, Oligella ureolytica
acttttctcaacgaagaaaa

SEQ ID NO: 46072 - DNA, 20 bp, Bacillus coagulans
cctccgcatggaggaaaaag

SEQ ID NO: 46073 - DNA, 20 bp, Campylobacter concisus
ggcccaagcttgcttgggta

SEQ ID NO: 46074 - DNA, 20 bp, Prevotella intermedia
ccatgcgactctcatatgtt

SEQ ID NO: 46075 - DNA, 20 bp, Clostridium paraputrificum
cccgtaagggaggaagccac

SEQ ID NO: 46076 - DNA, 20 bp, Neisseria polysaccharea
gagagggaaagcaggggacc

SEQ ID NO: 46077 - DNA, 20 bp, Prevotella melaninogenica
gtcttcgatgacggcatcag

SEQ ID NO: 46078 - DNA, 20 bp, Corynebacterium hoagii
ggatatgagctcctgtcgca

SEQ ID NO: 46079 - DNA, 20 bp, Bacillus fusiformis
agcgaacagagaaggagctt

SEQ ID NO: 46080 - DNA, 20 bp, Bacillus halodurans
gtcgagcggaccaaagggag

SEQ ID NO: 46081 - DNA, 20 bp, Bacillus sp
aactccctatctctagggcc

SEQ ID NO: 46082 - DNA, 20 bp, Plesiomonas shigelloides
ggtttgagagaatgaccagt

SEQ ID NO: 46083 - DNA, 20 bp, Corynebacterium matruchotii
tagggacgaagcttttttgt

SEQ ID NO: 46084 - DNA, 20 bp, Bacteroides fragilis
tgccctttactcggggatag

SEQ ID NO: 46085 - DNA, 20 bp, Gemella morbillorum
tgcttgcactagaaaaactt

SEQ ID NO: 46086 - DNA, 20 bp, Enterococcus cecorum
gcccatcagcgggggataac

SEQ ID NO: 46087 - DNA, 20 bp, Achromobacter xylosoxidans
cgggttaataccccgcggaa

SEQ ID NO: 46088 - DNA, 20 bp, Stenotrophomonas maltophilia
gttaatacccggttgggatg

SEQ ID NO: 46089 - DNA, 20 bp, Alicyclobacillus acidocaldarius
tcaacgcgctggtaacacag

SEQ ID NO: 46090 - DNA, 20 bp, Lactococcus lactis
aactctgttggtagagaaga

SEQ ID NO: 46091 - DNA, 20 bp, Stenotrophomonas maltophilia
actgcagtggatactgggcg

SEQ ID NO: 46092 - DNA, 20 bp, Streptococcus sobrinus
agagtttttcttcggaacat

SEQ ID NO: 46093 - DNA, 20 bp, Leuconostoc pseudomesenteroides
aaagttaaaaggcgctttgg

SEQ ID NO: 46094 - DNA, 20 bp, Stenotrophomonas maltophilia
gggcgactagaatgtggtag

SEQ ID NO: 46095 - DNA, 20 bp, Peptostreptococcus anaerobius
tgagataactgcccaccaag

SEQ ID NO: 46096 - DNA, 20 bp, Vagococcus fluvialis
atggcctaccaagaccgtga

SEQ ID NO: 46097 - DNA, 20 bp, Granulicatella elegans
ttggtcaatctagtggcgaa

SEQ ID NO: 46098 - DNA, 20 bp, Enterococcus dispar
aggcgcttttgcgtcacttg

SEQ ID NO: 46099 - DNA, 20 bp, Paenibacillus glucanolyticus
gacatccctctgaatctgct

SEQ ID NO: 46100 - DNA, 20 bp, Propionibacterium avidum
tggaaagcttcggcggtttt

SEQ ID NO: 46101 - DNA, 20 bp, Anaerococcus prevotii
agctccggcggtctaagatg

SEQ ID NO: 46102 - DNA, 20 bp, Photobacterium damselae
gtagggaggaaggtagtgta

SEQ ID NO: 46103 - DNA, 20 bp, Morganella morganii
aggcggttgattgagtcaga

SEQ ID NO: 46104 - DNA, 20 bp, Veillonella atypica
ggtcagtctgtcttaaaagt

SEQ ID NO: 46105 - DNA, 20 bp, Bacillus flexus
tagaagcttgcttctatgac

SEQ ID NO: 46106 - DNA, 20 bp, Peptoniphilus indolicus
gtgaagaggtaagtggaatt

SEQ ID NO: 46107 - DNA, 20 bp, Weeksella virosa
tttaaagacggggactctaa

SEQ ID NO: 46108 - DNA, 20 bp, Streptococcus thoraltensis
cgagttgcgagctggtgaca

SEQ ID NO: 46109 - DNA, 20 bp, Moraxella osloensis
ctggtggtgctagaatatgt

SEQ ID NO: 46110 - DNA, 20 bp, Neisseria lactamica
ttacccggttttgacatgta

SEQ ID NO: 46111 - DNA, 20 bp, Bacillus pallidus
gtgttagagggtatccaccc

SEQ ID NO: 46112 - DNA, 20 bp, Streptococcus canis
taagaacttaaaaggggcaa

SEQ ID NO: 46113 - DNA, 20 bp, Anaerococcus prevotii
ggctcattctgacgctgagg

SEQ ID NO: 46114 - DNA, 20 bp, Fusobacterium nucleatum
tttaacttaggtttgggtgg

SEQ ID NO: 46115 - DNA, 20 bp, Lactococcus garvieae
tgtagcgcagctaacgcatt

SEQ ID NO: 46116 - DNA, 20 bp, Aerococcus viridans
agattgaaagacggctctgc

SEQ ID NO: 46117 - DNA, 20 bp, Alicyclobacillus acidocaldarius
cggtaccgtctcgcatgggg

SEQ ID NO: 46118 - DNA, 20 bp, Pediococcus inopinatus
cccaccaaggctgtgatacg

SEQ ID NO: 46119 - DNA, 20 bp, Bacillus thuringiensis
accgcatggttcgaaattga

SEQ ID NO: 46120 - DNA, 20 bp, Pseudoramibacter alactolyticus
ctgggagtaaagccttatat

SEQ ID NO: 46121 - DNA, 20 bp, Prevotella melaninogenica
tgaattgcagaggaaggatt

SEQ ID NO: 46122 - DNA, 20 bp, Facklamia sourekii
aggcgactttctggtctgac

SEQ ID NO: 46123 - DNA, 20 bp, Bacillus schlegellii
ctaataccggatagattgtc

SEQ ID NO: 46124 - DNA, 20 bp, Leuconostoc citreum
ggaagaaatgctaaaatagg

SEQ ID NO: 46125 - DNA, 20 bp, Moraxella bovis
actatctagcttgctagata

SEQ ID NO: 46126 - DNA, 20 bp, Leptotrichia buccalis
tgggtgtgggcatgaagagt

SEQ ID NO: 46127 - DNA, 20 bp, Moraxella osloensis
atgactctctagcttgctag

SEQ ID NO: 46128 - DNA, 20 bp, Neisseria polysaccharea
acgtcttgagagggaaagca

SEQ ID NO: 46129 - DNA, 20 bp, Bacteroides capilosus
agtgctggagaggcaatcgg

SEQ ID NO: 46130 - DNA, 20 bp, Actinomyces naeslundii
gggtctgtcgcatggtgggc

SEQ ID NO: 46131 - DNA, 20 bp, Bacteroides vulgatus
aagactgccatcgtaagatg

SEQ ID NO: 46132 - DNA, 20 bp, Lactococcus lactis
taagtttgaaagatgcaatt

SEQ ID NO: 46133 - DNA, 20 bp, Geobacillus thermoglucosidasius
tacggtgacggtacctaacg

SEQ ID NO: 46134 - DNA, 20 bp, Arcanobacterium bernardiae
gacatacactgcgatgtgcc

SEQ ID NO: 46135 - DNA, 20 bp, Kingella denitrificans
cgggggtgcttgcacctgcc

SEQ ID NO: 46136 - DNA, 20 bp, Bacteroides capilosus
ataacagtccgaaaggactg

SEQ ID NO: 46137 - DNA, 20 bp, Campylobacter concisus
gatacgacatgtcaccgcat

SEQ ID NO: 46138 - DNA, 20 bp, Bacillus coagulans
gggtgatgccgggaactcaa

SEQ ID NO: 46139 - DNA, 20 bp, Eschericchia vulneris
tgggaggcaagcagtgggga

SEQ ID NO: 46140 - DNA, 20 bp, Nocardia asteroides
gtaactgacctagcggcgga

SEQ ID NO: 46141 - DNA, 20 bp, Streptococcus canis
agtggaaaacccattatgtg

SEQ ID NO: 46142 - DNA, 20 bp, Clostridium innocuum
gggagtcagtaatacccgaa

SEQ ID NO: 46143 - DNA, 20 bp, Prevotella intermedia
cgggagtgttactgacgctt

SEQ ID NO: 46144 - DNA, 20 bp, Gemella haemolysans
ggttttgctaacactatgag

SEQ ID NO: 46145 - DNA, 20 bp, Bacteroides capilosus
tttatcgctctgagatggcc

SEQ ID NO: 46146 - DNA, 20 bp, Pasteurella multocida
gttgttaaatagatagcatc

SEQ ID NO: 46147 - DNA, 20 bp, Aerococcus christensenii
tgctatcacttatcgatggc

SEQ ID NO: 46148 - DNA, 20 bp, Bacteroides vulgatus
ggggtacagagggccgctac

SEQ ID NO: 46149 - DNA, 20 bp, Methylobacterium mesophilicum
gttggggtgcttgcaccgca

SEQ ID NO: 46150 - DNA, 20 bp, Clostridium glycolicum
tcacttcggtgaagagcggc

SEQ ID NO: 46151 - DNA, 20 bp, Anaerococcus prevotii
tgagtgctaggtatcggaat

SEQ ID NO: 46152 - DNA, 20 bp, Corynebacterium glucuronolyticum
gggcattgcttgagtgctgt

SEQ ID NO: 46153 - DNA, 20 bp, Paenibacillus amylolyticus
tctggtgtttaaggccaagg

SEQ ID NO: 46154 - DNA, 20 bp, Bacteroides uniformis
atgatgtggagacatgtcag

SEQ ID NO: 46155 - DNA, 20 bp, Propionibacterium acnes
taagtcggtacaaggtagcc

SEQ ID NO: 46156 - DNA, 20 bp, Gemella haemolysans
ttggtctcataagagatcag

SEQ ID NO: 46157 - DNA, 20 bp, Propionibacterium freudenreichii
agggatcgtctcgcggccta

SEQ ID NO: 46158 - DNA, 20 bp, Globicatella sanguinis
cgctaactcgcaagagcatg

SEQ ID NO: 46159 - DNA, 20 bp, Arcanobacterium bernardiae
attctgctttcatcgcatgg

SEQ ID NO: 46160 - DNA, 20 bp, Haemophilus actinemycetemcomitans
gagggtaaccaaccagcgat

SEQ ID NO: 46161 - DNA, 20 bp, Actinobacillus ureae
tggggattggactgtgagtt

SEQ ID NO: 46162 - DNA, 20 bp, Bacteroides fragilis
aagtgcagtatgtatactgt

SEQ ID NO: 46163 - DNA, 20 bp, Fusobacterium mortiferum
ccggatattatgtgagtttc

SEQ ID NO: 46164 - DNA, 20 bp, Paenibacillus larvae
taataccggatagctggttt

SEQ ID NO: 46165 - DNA, 20 bp, Staphylococcus carnosus
ccgcatggttctgcaatgaa

SEQ ID NO: 46166 - DNA, 20 bp, Capnocytophaga gingivalis
ttcacagggggatagcccga

SEQ ID NO: 46167 - DNA, 20 bp, Oligella urethralis
tattagcctaagacttttct

SEQ ID NO: 46168 - DNA, 20 bp, Eggerthella lenta
gtcgcggcccattaggtagt

SEQ ID NO: 46169 - DNA, 20 bp, Bacteroides uniformis
acctgccgatgactcgggga

SEQ ID NO: 46170 - DNA, 20 bp, Haemophilus aegyptius
agagacgaaagtgcgggact

SEQ ID NO: 46171 - DNA, 20 bp, Anaerococcus prevotii
ttcttcggaagcctcaatac

SEQ ID NO: 46172 - DNA, 20 bp, Veillonella atypica
aagtcgaacgaagagcgatg

SEQ ID NO: 46173 - DNA, 20 bp, Bacteroides merdae
gaaagtttgtggctcaacca

SEQ ID NO: 46174 - DNA, 20 bp, Citrobacter koseri
ctcagagatgagactgtgcc

SEQ ID NO: 46175 - DNA, 20 bp, Porphyromonas endodontalis
ctgaggactctatcgagaca

SEQ ID NO: 46176 - DNA, 20 bp, Clostridium limosum
ctcaaccccggtgctgcatt

SEQ ID NO: 46177 - DNA, 20 bp, Brevibacillus borstelensis
cgagcgagtcccttcggggg

SEQ ID NO: 46178 - DNA, 20 bp, Clostridium histolyticum
agagagaagcaagaccgtga

SEQ ID NO: 46179 - DNA, 20 bp, Aeromonas hydrophila
atgcctaatacgtatcaact

SEQ ID NO: 46180 - DNA, 20 bp, Clostridium ramosum
atgcaagtcgaacgcgagca

SEQ ID NO: 46181 - DNA, 20 bp, Actinomyces turicensis
aggtgtgggggccacccgtg

SEQ ID NO: 46182 - DNA, 20 bp, Facklamia hominis
agccggtggcctaactttat

SEQ ID NO: 46183 - DNA, 20 bp, Clostridium clostridiiforme
ggttaagcaagtctgaagtg

SEQ ID NO: 46184 - DNA, 20 bp, Pseudoramibacter alactolyticus
tttgaatgatccttcgggtg

SEQ ID NO: 46185 - DNA, 20 bp, Clostridium innocuum
aaaccatgggagtcagtaat

SEQ ID NO: 46186 - DNA, 20 bp, Geobacillus thermoglucosidasius
actctagggggactgcccgg

SEQ ID NO: 46187 - DNA, 20 bp, Vibrio hollisae
gccagaagtgggtagggtaa

SEQ ID NO: 46188 - DNA, 20 bp, Bacteroides thetaiotaomicron
cgttccattagtttgttggc

SEQ ID NO: 46189 - DNA, 20 bp, Arcanobacterium bernardiae
accggatattctgctttcat

SEQ ID NO: 46190 - DNA, 20 bp, Oligella urethralis
ctaagacttttcttcgttga

SEQ ID NO: 46191 - DNA, 20 bp, Oligella ureolytica
ttgtaaaccacttttctcaa

SEQ ID NO: 46192 - DNA, 20 bp, Alicyclobacillus acidocaldarius
cccatggttgagccatggac

SEQ ID NO: 46193 - DNA, 20 bp, Clostridium paraputrificum
tgtagcttcgcatgaagtag

SEQ ID NO: 46194 - DNA, 20 bp, Helcococcus ovis
tgagtgctagttgtcgggag

SEQ ID NO: 46195 - DNA, 20 bp, Streptococcus mitis
atttgcttaaaaggtgcaat

SEQ ID NO: 46196 - DNA, 20 bp, Alicyclobacillus acidocaldarius
ctccccgagcaacagagctt

SEQ ID NO: 46197 - DNA, 20 bp, Porphyromonas maccae
atgaagtaggcggaatttgt

SEQ ID NO: 46198 - DNA, 20 bp, Corynebacterium auris
cgcttgcgggggtactcgag

SEQ ID NO: 46199 - DNA, 20 bp, Microbacterium terregens
ctggaaagaacttcggtcag

SEQ ID NO: 46200 - DNA, 20 bp, Porphyromonas endodontalis
aaagatttattgattacaga

SEQ ID NO: 46201 - DNA, 20 bp, Pediococcus acidilactici
cgaacttccgttaattgatc

SEQ ID NO: 46202 - DNA, 20 bp, Dermabacter hominis
aagctttatgcggggagtcg

SEQ ID NO: 46203 - DNA, 20 bp, Corynebacterium coyleae
aggctcctgcttgcaggggt

SEQ ID NO: 46204 - DNA, 20 bp, Bacteroides fragilis
catggtttcattattaaagg

SEQ ID NO: 46205 - DNA, 20 bp, Prevotella melaninogenica
cattgagtgcttgcactcaa

SEQ ID NO: 46206 - DNA, 20 bp, Paenibacillus macerans
agccaatcctatcaaagctg

SEQ ID NO: 46207 - DNA, 20 bp, Brochothrix campestris
ggataatacaaagggtcgcg

SEQ ID NO: 46208 - DNA, 20 bp, Alicyclobacillus acidocaldarius
cgaactacgagcggcttttt

SEQ ID NO: 46209 - DNA, 20 bp, Bacillus sp
cctctgacctccctagagat

SEQ ID NO: 46210 - DNA, 20 bp, Prevotella corporis
ggatgcgtccgattagcttg

SEQ ID NO: 46211 - DNA, 20 bp, Clostridium tetani
gcggtttcctggactgtaac

SEQ ID NO: 46212 - DNA, 20 bp, Actinomyces bovis
gtttactaggagggagccgt

SEQ ID NO: 46213 - DNA, 20 bp, Neisseria lactamica
ctatccgagcggccgatatc

SEQ ID NO: 46214 - DNA, 20 bp, Gemella sanguinis
tacagtagagacggtaccta

SEQ ID NO: 46215 - DNA, 20 bp, Leptotrichia buccalis
gtgtccgtgccgaagctaat

SEQ ID NO: 46216 - DNA, 20 bp, Moraxella bovis
acgatgactatctagcttgc

SEQ ID NO: 46217 - DNA, 20 bp, Bacteroides thetaiotaomicron
agtcgaggggcagcatttca

SEQ ID NO: 46218 - DNA, 20 bp, Prevotella melaninogenica
acgtgtgattgtttgcaggt

SEQ ID NO: 46219 - DNA, 20 bp, Prevotella bivia
tgcaggtaccatatgaataa

SEQ ID NO: 46220 - DNA, 20 bp, Granulicatella elegans
cggtgcttgcactggtcaat

SEQ ID NO: 46221 - DNA, 20 bp, Alloiococcus otitis
caaccgtggaacggcattgg

SEQ ID NO: 46222 - DNA, 20 bp, Prevotella melaninogenica
cgctgttggtacctggtatc

SEQ ID NO: 46223 - DNA, 20 bp, Streptococcus sp.
ataattaattgaaagatgca

SEQ ID NO: 46224 - DNA, 20 bp, Helcococcus kunzii
cggagacttgtatacaggtg

SEQ ID NO: 46225 - DNA, 20 bp, Campylobacter concisus
aagccagtggcctgtcaaag

SEQ ID NO: 46226 - DNA, 20 bp, Actinomyces neuii
acctgcccttttctttggga

SEQ ID NO: 46227 - DNA, 20 bp, Brevibacterium epidermidis
aagtttttcgatcggggatg

SEQ ID NO: 46228 - DNA, 20 bp, Pasteurella trehalosi
aggtgttttgtttaatagac

SEQ ID NO: 46229 - DNA, 20 bp, Bacillus sp
cgcatggagagagattgaaa

SEQ ID NO: 46230 - DNA, 20 bp, Eikenella corrodens
gaaaagggaagtgctaatac

SEQ ID NO: 46231 - DNA, 20 bp, Weeksella virosa
cagcgtttaaagacggggac

SEQ ID NO: 46232 - DNA, 20 bp, Comamonas terrigena
tcgggttaataccctggagt

SEQ ID NO: 46233 - DNA, 20 bp, Pediococcus inopinatus
ttcttttaaaagatggcttc

SEQ ID NO: 46234 - DNA, 20 bp, Bacteroides forsythus
ttcttcccttcggggcgtct

SEQ ID NO: 46235 - DNA, 20 bp, Streptococcus constellatus
tagtttactacaccgtattc

SEQ ID NO: 46236 - DNA, 20 bp, Pediococcus inopinatus
ccgcatggttttcttttaaa

SEQ ID NO: 46237 - DNA, 20 bp, Anaerococcus prevotii
agggcttgacatactgagga

SEQ ID NO: 46238 - DNA, 20 bp, Fusobacterium varium
atcccaagaagttaacagag

SEQ ID NO: 46239 - DNA, 20 bp, Actinomyces bovis
gaagaacgataggaagaggg

SEQ ID NO: 46240 - DNA, 20 bp, Brevibacillus thermoruber
ggtaagccaatctcttaaaa

SEQ ID NO: 46241 - DNA, 20 bp, Actinomyces meyeri
gtgcgtgcatttggttgggg

SEQ ID NO: 46242 - DNA, 20 bp, Weeksella virosa
atcgcttaacgatagaactg

SEQ ID NO: 46243 - DNA, 20 bp, Alicyclobacillus acidocaldarius
tcggcactggggtgtgtccc

SEQ ID NO: 46244 - DNA, 20 bp, Anaerobiospirillum succiniciproducens
accgtgaggtggagtggaac

SEQ ID NO: 46245 - DNA, 20 bp, Gemella haemolysans
ctgcatggttgatgtttaaa

SEQ ID NO: 46246 - DNA, 20 bp, Tetragenococcus halophilus
aaaggcgctttacagcgtca

SEQ ID NO: 46247 - DNA, 20 bp, Bacillus pumilus
aaccgcatggttcaaggatg

SEQ ID NO: 46248 - DNA, 20 bp, Actinomyces naeslundii
tctgtcgcatggtgggcctg

SEQ ID NO: 46249 - DNA, 20 bp, Clostridium clostridiiforme
gttttgctagagtgtcggag

SEQ ID NO: 46250 - DNA, 20 bp, Brochothrix campestris
taacacccaaagccggtttg

SEQ ID NO: 46251 - DNA, 20 bp, Bacteroides fragilis
tcaccaagccttcgatggat

SEQ ID NO: 46252 - DNA, 20 bp, Atopobium parvulum
ctgggttgagagaccgacca

SEQ ID NO: 46253 - DNA, 20 bp, Stenotrophomonas maltophilia
gctggttaatacccggttgg

SEQ ID NO: 46254 - DNA, 20 bp, Brevibacillus choshinensis
cagaccgcatggtctgaaag

SEQ ID NO: 46255 - DNA, 20 bp, Neisseria subflava
aaggctgttgctaacatcag

SEQ ID NO: 46256 - DNA, 20 bp, Bacillus coagulans
cgacttggaggctgttcccc

SEQ ID NO: 46257 - DNA, 20 bp, Providencia stuartii
atggcatctaagactggtta

SEQ ID NO: 46258 - DNA, 20 bp, Bacteroides stercoris
aaaccgacgatggatagggg

SEQ ID NO: 46259 - DNA, 20 bp, Acinetobacter baumannii
cgagcgggggaaggtagctt

SEQ ID NO: 46260 - DNA, 20 bp, Campylobacter rectus
agtcgaggcagtaatgcacc

SEQ ID NO: 46261 - DNA, 20 bp, Kingella kingae
gaaggaaagcaggggatctt

SEQ ID NO: 46262 - DNA, 20 bp, Myroides odoratus
tatcggtaaaagatgggcat

SEQ ID NO: 46263 - DNA, 20 bp, Prevotella melaninogenica
tactgtgggataacctgccg

SEQ ID NO: 46264 - DNA, 20 bp, Streptococcus constellatus
atgcaagtagaccgcacagg

SEQ ID NO: 46265 - DNA, 20 bp, Fusobacterium nucleatum
aatgagacagagatgtttca

SEQ ID NO: 46266 - DNA, 20 bp, Veillonella dispar
cgaggatagatgaaaggtgg

SEQ ID NO: 46267 - DNA, 20 bp, Bacillus pumilus
gttccttgaaccgcatggtt

SEQ ID NO: 46268 - DNA, 20 bp, Prevotella loescheii
ccgggcttgaactgcggcgg

SEQ ID NO: 46269 - DNA, 20 bp, Moraxella osloensis
tctctagcttgctagagatg

SEQ ID NO: 46270 - DNA, 20 bp, Eubacterium moniliforme
gaaaccctgacccagcaacg

SEQ ID NO: 46271 - DNA, 20 bp, Brevibacillus agri
ggacgaacacgtaccgttcg

SEQ ID NO: 46272 - DNA, 20 bp, Acinetobacter lwoffii
tggccaattaagtcaaatgt

SEQ ID NO: 46273 - DNA, 20 bp, Bacillus sp
ggctaatactggataacttt

SEQ ID NO: 46274 - DNA, 20 bp, Moraxella osloensis
aagggggcgcaagctcttgc

SEQ ID NO: 46275 - DNA, 20 bp, Streptococcus anginosus
atgtaacacatgttagatgc

SEQ ID NO: 46276 - DNA, 20 bp, Facklamia sourekii
atcctacgggacaaggagac

SEQ ID NO: 46277 - DNA, 20 bp, Tetragenococcus halophilus
acgtggggaacctatccatc

SEQ ID NO: 46278 - DNA, 20 bp, Acinetobacter haemolyticus
gggaagtgtagcttgctaca

SEQ ID NO: 46279 - DNA, 20 bp, Bacteroides uniformis
ggagacatgtcagccgcaag

SEQ ID NO: 46280 - DNA, 20 bp, Campylobacter rectus
cagagatggaagagtgtctg

SEQ ID NO: 46281 - DNA, 20 bp, Bacillus licheniformis
tcccttaggtcagcggcgga

SEQ ID NO: 46282 - DNA, 20 bp, Lactococcus raffinolactis
gtgatgtcaagctaatctct

SEQ ID NO: 46283 - DNA, 20 bp, Dermabacter hominis
cgatgaagctgtgcttgcac

SEQ ID NO: 46284 - DNA, 20 bp, Campylobacter concisus
ggcctgtcaaagggagctgc

SEQ ID NO: 46285 - DNA, 20 bp, Anaerococcus prevotii
ggcttgacatactgaggacc

SEQ ID NO: 46286 - DNA, 20 bp, Bacillus sp
cggccctagagatagggagt

SEQ ID NO: 46287 - DNA, 20 bp, Neisseria subflava
gctgttgctaacatcagcgg

SEQ ID NO: 46288 - DNA, 20 bp, Clostridium butyricum
ggtacagcaattaaaggagt

SEQ ID NO: 46289 - DNA, 20 bp, Staphylococcus condimenti
taatgccggataatatgcgg

SEQ ID NO: 46290 - DNA, 20 bp, Campylobacter curvus
agctagtcttggcagtaatg

SEQ ID NO: 46291 - DNA, 20 bp, Arcanobacterium bernardiae
agggtatgtgcagaagaagc

SEQ ID NO: 46292 - DNA, 20 bp, Fusobacterium mortiferum
agaacttgccctgcagtctg

SEQ ID NO: 46293 - DNA, 20 bp, Prevotella oris
aacgattcagagatgatgag

SEQ ID NO: 46294 - DNA, 20 bp, Gemella haemolysans
tgttgttctgacctttggtt

SEQ ID NO: 46295 - DNA, 20 bp, Haemophilus paraphrophilus
atgaaagtgtgggacctttg

SEQ ID NO: 46296 - DNA, 20 bp, Fusobacterium nucleatum
cagagagtcgcaaagctgtg

SEQ ID NO: 46297 - DNA, 20 bp, Streptococcus agalactiae
aagagtaattaacacatgtt

SEQ ID NO: 46298 - DNA, 20 bp, Kytococcus sedentarius
gacatgcaccggatcgcctc

SEQ ID NO: 46299 - DNA, 20 bp, Haemophilus actinemycetemcomitans
tagcatgccaaattgacgtt

SEQ ID NO: 46300 - DNA, 20 bp, Campylobacter concisus
cattgtggaaagttttttcg

SEQ ID NO: 46301 - DNA, 20 bp, Brevibacillus choshinensis
cgcgaatcccttaaaaccat

SEQ ID NO: 46302 - DNA, 20 bp, Prevotella melaninogenica
gcactcaatggacgtcgacc

SEQ ID NO: 46303 - DNA, 20 bp, Bacillus circulans
ctgaaagacggtttacgctg

SEQ ID NO: 46304 - DNA, 20 bp, Haemophilus segnis
gtttaatagactaggtgatt

SEQ ID NO: 46305 - DNA, 20 bp, Rothia mucilaginosa
gagagattgacggtacctgc

SEQ ID NO: 46306 - DNA, 20 bp, Streptococcus sp.
aattgaaagatgcaattgca

SEQ ID NO: 46307 - DNA, 20 bp, Leptotrichia buccalis
tctggggtgaaaacttgcgg

SEQ ID NO: 46308 - DNA, 20 bp, Lactococcus garvieae
tgatcccgcgttgtattagc

SEQ ID NO: 46309 - DNA, 20 bp, Empedobacter brevis
ttgtaaactacttttatctg

SEQ ID NO: 46310 - DNA, 20 bp, Bacillus pallidus
gggcgttcccctttcgggga

SEQ ID NO: 46311 - DNA, 20 bp, Dermabacter hominis
cgaagccgatggcccaagct

SEQ ID NO: 46312 - DNA, 20 bp, Streptococcus gordonii
tattgcatgataattaattg

SEQ ID NO: 46313 - DNA, 20 bp, Pediococcus dextrinicus
gacatctagcgccaatccta

SEQ ID NO: 46314 - DNA, 20 bp, Bacillus lentus
agggaagaccctgtctccag

SEQ ID NO: 46315 - DNA, 20 bp, Bacteroides thetaiotaomicron
ggaattttgtatgtaccata

SEQ ID NO: 46316 - DNA, 20 bp, Paenibacillus peoriae
ggttgtttagaagcttgctt

SEQ ID NO: 46317 - DNA, 20 bp, Haemophilus paraphrophilus
cataggatgaacccaagtgg

SEQ ID NO: 46318 - DNA, 20 bp, Bacteroides thetaiotaomicron
attgcatttgaatattttgg

SEQ ID NO: 46319 - DNA, 20 bp, Propionibacterium freudenreichii
gcggtcagggatcgtctcgc

SEQ ID NO: 46320 - DNA, 20 bp, Kocuria kristinae
ggatcgttccagagatggtt

SEQ ID NO: 46321 - DNA, 20 bp, Prevotella loescheii
cgatggatgctcgttgtcgg

SEQ ID NO: 46322 - DNA, 20 bp, Moraxella bovis
tatctagcttgctagatatg

SEQ ID NO: 46323 - DNA, 20 bp, Streptococcus oralis
tccgagcggatgagttgcga

SEQ ID NO: 46324 - DNA, 20 bp, Finegoldia magna
ctgcctatgacagtgggata

SEQ ID NO: 46325 - DNA, 20 bp, Paenibacillus pabuli
acctgccctcaagtttggga

SEQ ID NO: 46326 - DNA, 20 bp, Oligella urethralis
ggtattagcctaagactttt

SEQ ID NO: 46327 - DNA, 20 bp, Lactococcus garvieae
ttccttcgggacacgggata

SEQ ID NO: 46328 - DNA, 20 bp, Brevibacillus laterosporus
gaagatgctaatctcttaaa

SEQ ID NO: 46329 - DNA, 20 bp, Anaerococcus tetradius
gctcaactatataaagcttt

SEQ ID NO: 46330 - DNA, 20 bp, Kingella kingae
gatcagtagtgggtctgaga

SEQ ID NO: 46331 - DNA, 20 bp, Facklamia ignava
actggaatgggaaagacggc

SEQ ID NO: 46332 - DNA, 20 bp, Moraxella  catarrhalis
gggtcttttaaagacttagt

SEQ ID NO: 46333 - DNA, 20 bp, Atopobium parvulum
cttttaggagggagacgccg

SEQ ID NO: 46334 - DNA, 20 bp, Peptostreptococcus anaerobius
taagcttgacatcccttaga

SEQ ID NO: 46335 - DNA, 20 bp, Corynebacterium auris
agctaatcgctagaaagccg

SEQ ID NO: 46336 - DNA, 20 bp, Haemophilus actinemycetemcomitans
agagatgggtttgtgcctta

SEQ ID NO: 46337 - DNA, 20 bp, Actinomyces neuii
ttgcgttgggtacgggcagg

SEQ ID NO: 46338 - DNA, 20 bp, Bacteroides fragilis
ttaaattgcagtggaatgat

SEQ ID NO: 46339 - DNA, 20 bp, Campylobacter concisus
aacgcgcatgcgagcctgtg

SEQ ID NO: 46340 - DNA, 20 bp, Streptococcus suis
gtggaaagtttctcacttga

SEQ ID NO: 46341 - DNA, 20 bp, Bacteroides uniformis
attaatacccgatggcatag

SEQ ID NO: 46342 - DNA, 20 bp, Alicyclobacillus acidocaldarius
gggtgtgtccccccaacacc

SEQ ID NO: 46343 - DNA, 20 bp, Clostridium ramosum
cctgccctagacagggggat

SEQ ID NO: 46344 - DNA, 20 bp, Leuconostoc lactis
gtagggttgaaagatggttt

SEQ ID NO: 46345 - DNA, 20 bp, Paenibacillus macerans
attaagtctggtgtttaagg

SEQ ID NO: 46346 - DNA, 20 bp, Bacteroides merdae
cagattgatggcgaccggcg

SEQ ID NO: 46347 - DNA, 20 bp, Arcanobacterium bernardiae
tgtggggccttttccacggg

SEQ ID NO: 46348 - DNA, 20 bp, Streptococcus gordonii
tagcttgctacaccatagac

SEQ ID NO: 46349 - DNA, 20 bp, Clostridium glycolicum
gcagccaagtcgtgaggccg

SEQ ID NO: 46350 - DNA, 20 bp, Fusobacterium varium
cctgaagtaacaggcctaac

SEQ ID NO: 46351 - DNA, 20 bp, Myroides odoratus
gtataagatgggcatgcgta

SEQ ID NO: 46352 - DNA, 20 bp, Fusobacterium necrogenes
aagttggcagagatgccttc

SEQ ID NO: 46353 - DNA, 20 bp, Clostridium glycolicum
gcaagtcgagcgattcactt

SEQ ID NO: 46354 - DNA, 20 bp, Fusobacterium nucleatum
ttatgattttagggcatcct

SEQ ID NO: 46355 - DNA, 20 bp, Fusobacterium nucleatum
agagagtcgcaaagctgtga

SEQ ID NO: 46356 - DNA, 20 bp, Corynebacterium glucuronolyticum
gattgggctagagatagttc

SEQ ID NO: 46357 - DNA, 20 bp, Actinomyces bovis
tgtgtaatagttatggcgga

SEQ ID NO: 46358 - DNA, 20 bp, Peptoniphilus indolicus
cagggcttgacataatattg

SEQ ID NO: 46359 - DNA, 20 bp, Streptococcus alactolyticus
agagtttttcttcggaacac

SEQ ID NO: 46360 - DNA, 20 bp, Anaerococcus prevotii
tgtaagcatttgaaactgca

SEQ ID NO: 46361 - DNA, 20 bp, Peptoniphilus indolicus
ctttgacacggggatagcca

SEQ ID NO: 46362 - DNA, 20 bp, Tissierella praeacuta
gcatgagatttaagtcaaag

SEQ ID NO: 46363 - DNA, 20 bp, Fusobacterium mortiferum
gaaagctatatgcgctgcag

SEQ ID NO: 46364 - DNA, 20 bp, Bacteroides fragilis
ggtttcattattaaaggatt

SEQ ID NO: 46365 - DNA, 20 bp, Neisseria subflava
tagggttaatacccctgtct

SEQ ID NO: 46366 - DNA, 20 bp, Streptococcus dysgalactiae
actggtgcttgcaccggttc

SEQ ID NO: 46367 - DNA, 20 bp, Chromobacterium violaceum
atgtacggaacttgccagag

SEQ ID NO: 46368 - DNA, 20 bp, Acinetobacter baumannii
aaggtagcttgctaccggac

SEQ ID NO: 46369 - DNA, 20 bp, Pasteurella multocida
atgttgttaaatagatagca

SEQ ID NO: 46370 - DNA, 20 bp, Brochothrix campestris
cctgcctcacagctggggat

SEQ ID NO: 46371 - DNA, 20 bp, Anaerococcus tetradius
aaggcgactttctggtcatc

SEQ ID NO: 46372 - DNA, 20 bp, Campylobacter coli
gtacactagttgttggggtg

SEQ ID NO: 46373 - DNA, 20 bp, Paenibacillus apiarius
agttgggtgtttaaacctag

SEQ ID NO: 46374 - DNA, 20 bp, Prevotella melaninogenica
acctgccgaaaggcagacta

SEQ ID NO: 46375 - DNA, 20 bp, Facklamia hominis
acgaaggaaagacggcttcg

SEQ ID NO: 46376 - DNA, 20 bp, Clostridium ramosum
acgatctggcctgcaactga

SEQ ID NO: 46377 - DNA, 20 bp, Paenibacillus macerans
ctgtggctcaaccacagttc

SEQ ID NO: 46378 - DNA, 20 bp, Corynebacterium macginleyi
ggcctaaacgtgttagggag

SEQ ID NO: 46379 - DNA, 20 bp, Proteus penneri
tttatcaattgacgttaccc

SEQ ID NO: 46380 - DNA, 20 bp, Paenibacillus peoriae
tagagatagatctttccttc

SEQ ID NO: 46381 - DNA, 20 bp, Gemella haemolysans
actgcatggttgatgtttaa

SEQ ID NO: 46382 - DNA, 20 bp, Anaerococcus prevotii
aaaaagtctttcccagttcg

SEQ ID NO: 46383 - DNA, 20 bp, Facklamia sourekii
agcctagagataggtgaaat

SEQ ID NO: 46384 - DNA, 20 bp, Pediococcus dextrinicus
attgaaagacggcgtaagct

SEQ ID NO: 46385 - DNA, 20 bp, Gemella bergeri
gatagggacaaagagaagcg

SEQ ID NO: 46386 - DNA, 20 bp, Comamonas testosteroni
cttcgggccttgtgctacta

SEQ ID NO: 46387 - DNA, 20 bp, Bacteroides fragilis
aaacatgtcagtgagcaatc

SEQ ID NO: 46388 - DNA, 20 bp, Haemophilus actinemycetemcomitans
tagccctggtgcccgaagct

SEQ ID NO: 46389 - DNA, 20 bp, Enterococcus dispar
gcgcttttgcgtcacttgag

SEQ ID NO: 46390 - DNA, 20 bp, Peptoniphilus indolicus
taaacttgagtagtgaagag

SEQ ID NO: 46391 - DNA, 20 bp, Finegoldia magna
tgcctatgacagtgggatag

SEQ ID NO: 46392 - DNA, 20 bp, Leuconostoc citreum
atgctaaaatagggaatgat

SEQ ID NO: 46393 - DNA, 20 bp, Myroides odoratus
gctgttcggttttcggactg

SEQ ID NO: 46394 - DNA, 20 bp, Rothia mucilaginosa
gtagccgtaccggaagggcg

SEQ ID NO: 46395 - DNA, 20 bp, Streptococcus equi
aggtaaccgttaaggagcca

SEQ ID NO: 46396 - DNA, 20 bp, Prevotella bivia
ttcgggacatctgtgaaggt

SEQ ID NO: 46397 - DNA, 20 bp, Streptococcus equi
ggggtgaagtcgtacaaggt

SEQ ID NO: 46398 - DNA, 20 bp, Atopobium parvulum
gttaggtcgggagttaaatc

SEQ ID NO: 46399 - DNA, 20 bp, Paenibacillus lautus
gccaaggaagaacgtcttct

SEQ ID NO: 46400 - DNA, 20 bp, Veillonella dispar
gatagttcctcttcttcgga

SEQ ID NO: 46401 - DNA, 20 bp, Prevotella loescheii
tacagagagtcggtggcatg

SEQ ID NO: 46402 - DNA, 20 bp, Fusobacterium mortiferum
aataccggatattatgtgag

SEQ ID NO: 46403 - DNA, 20 bp, Oligella ureolytica
gttgtaaaccacttttctca

SEQ ID NO: 46404 - DNA, 20 bp, Prevotella oralis
ttggtggaggtgctgcatgg

SEQ ID NO: 46405 - DNA, 20 bp, Bacillus fusiformis
tcggctgtcgctataggatg

SEQ ID NO: 46406 - DNA, 20 bp, Weissella paramesenteroides
agaagaacggcactgagagt

SEQ ID NO: 46407 - DNA, 20 bp, Bacillus mycoides
taatattttgaactgcatag

SEQ ID NO: 46408 - DNA, 20 bp, Corynebacterium amycolatum
gataggaccatggtgtggat

SEQ ID NO: 46409 - DNA, 20 bp, Bacillus sp
gagcgcgggaagcaagtaga

SEQ ID NO: 46410 - DNA, 20 bp, Vibrio cholerae
aaggtattaacttaaccacc

SEQ ID NO: 46411 - DNA, 20 bp, Clostridium sordellii
tatgagagtcgcatggcttt

SEQ ID NO: 46412 - DNA, 20 bp, Facklamia ignava
atggtacagcgagaagcgac

SEQ ID NO: 46413 - DNA, 20 bp, Leuconostoc argentinum
aaagttgaaaggcgctacgg

SEQ ID NO: 46414 - DNA, 20 bp, Brochothrix campestris
catcataagatgttcaagtg

SEQ ID NO: 46415 - DNA, 20 bp, Citrobacter freundii
acgtgccttcgggaactctg

SEQ ID NO: 46416 - DNA, 20 bp, Bacillus pumilus
tagttccttgaaccgcatgg

SEQ ID NO: 46417 - DNA, 20 bp, Gemella haemolysans
gacatactgtgaggacacaa

SEQ ID NO: 46418 - DNA, 20 bp, Turicella otitidis
gtcttttcacgactttcgtg

SEQ ID NO: 46419 - DNA, 20 bp, Facklamia ignava
ctaccgtggctttgatgcat

SEQ ID NO: 46420 - DNA, 20 bp, Bacteroides forsythus
cgaccggatgccaatctcca

SEQ ID NO: 46421 - DNA, 20 bp, Staphylococcus capitis
tttagtgtcagttgtggaaa

SEQ ID NO: 46422 - DNA, 20 bp, Bacillus sp
tgtaagtgacagcttgcgcc

SEQ ID NO: 46423 - DNA, 20 bp, Bacteroides uniformis
ttgagtacagtagaggcagg

SEQ ID NO: 46424 - DNA, 20 bp, Streptococcus dysgalactiae
aagaatgatggtgggagtgg

SEQ ID NO: 46425 - DNA, 20 bp, Achromobacter xylosoxidans
gttaataccccgcggaactg

SEQ ID NO: 46426 - DNA, 20 bp, Clostridium tetani
ccaaaggagtaatctgcttt

SEQ ID NO: 46427 - DNA, 20 bp, Propionibacterium acnes
gtgtgcctcttttggggtcg

SEQ ID NO: 46428 - DNA, 20 bp, Oligella urethralis
attcctcaactaccgtcagc

SEQ ID NO: 46429 - DNA, 20 bp, Bacteroides stercoris
acgtgtggctttttgtatgt

SEQ ID NO: 46430 - DNA, 20 bp, Fusobacterium nucleatum
gtcgcaaagctgtgaagtgg

SEQ ID NO: 46431 - DNA, 20 bp, Myroides odoratus
aagaaattcggattaatgct

SEQ ID NO: 46432 - DNA, 20 bp, Tissierella praeacuta
ctcaaccgtggtaagcattt

SEQ ID NO: 46433 - DNA, 20 bp, Clostridium botulinum
attgctttgagatggacccg

SEQ ID NO: 46434 - DNA, 20 bp, Eubacterium moniliforme
agaacaattaaaggagcaat

SEQ ID NO: 46435 - DNA, 20 bp, Prevotella melaninogenica
tctgacttgcagcgcatact

SEQ ID NO: 46436 - DNA, 20 bp, Prevotella bivia
tagattgcagcgcgaactgt

SEQ ID NO: 46437 - DNA, 20 bp, Prevotella bivia
cccgctgttagcacctagtg

SEQ ID NO: 46438 - DNA, 20 bp, Facklamia ignava
ccttcagcgggggataacca

SEQ ID NO: 46439 - DNA, 20 bp, Bacillus licheniformis
cttgctcccttaggtcagcg

SEQ ID NO: 46440 - DNA, 20 bp, Finegoldia magna
ttaataccgcataaaatcgt

SEQ ID NO: 46441 - DNA, 20 bp, Weeksella virosa
cggacagaatgcaaggtgct

SEQ ID NO: 46442 - DNA, 20 bp, Brevibacillus choshinensis
caacgggcagccaactcgcg

SEQ ID NO: 46443 - DNA, 20 bp, Chryseobacterium meningosepticum
tacgtgtaagtagctgaagg

SEQ ID NO: 46444 - DNA, 20 bp, Bacillus sp
aatactggataacttttctc

SEQ ID NO: 46445 - DNA, 20 bp, Propionibacterium propionicus
gtttggaaagttctggcggt

SEQ ID NO: 46446 - DNA, 20 bp, Photobacterium damselae
ttgaagagattcgagtgtgc

SEQ ID NO: 46447 - DNA, 20 bp, Anaerobiospirillum succiniciproducens
cttgacatcgtaggaatctt

SEQ ID NO: 46448 - DNA, 20 bp, Aerococcus viridans
gacattctggtctgttactg

SEQ ID NO: 46449 - DNA, 20 bp, Bacteroides fragilis
atggtttcattattaaagga

SEQ ID NO: 46450 - DNA, 20 bp, Streptococcus bovis
ctgactactttagcttgcta

SEQ ID NO: 46451 - DNA, 20 bp, Bacillus sp
ctggataacttttctctccg

SEQ ID NO: 46452 - DNA, 20 bp, Tetragenococcus halophilus
ccatgacggtagctgaccag

SEQ ID NO: 46453 - DNA, 20 bp, Methylobacterium mesophilicum
tgttatggggagagattccc

SEQ ID NO: 46454 - DNA, 20 bp, Staphylococcus condimenti
ataatatgcggaaccgcatg

SEQ ID NO: 46455 - DNA, 20 bp, Actinomyces neuii
aaagtctgatgcagcgacgt

SEQ ID NO: 46456 - DNA, 20 bp, Moraxella  catarrhalis
agtcgttgggtcttttaaag

SEQ ID NO: 46457 - DNA, 20 bp, Aerococcus christensenii
ttatcgatggccttgcggtg

SEQ ID NO: 46458 - DNA, 20 bp, Tissierella praeacuta
acacttaaatgtcgcatgag

SEQ ID NO: 46459 - DNA, 20 bp, Clostridium tetani
aaggcggtttcctggactgt

SEQ ID NO: 46460 - DNA, 20 bp, Haemophilus segnis
cgcaggcggctatttaagtg

SEQ ID NO: 46461 - DNA, 20 bp, Clostridium botulinum
tgtagggggtatcaactccc

SEQ ID NO: 46462 - DNA, 20 bp, Bacteroides thetaiotaomicron
gcctcatactcggggatagc

SEQ ID NO: 46463 - DNA, 20 bp, Anaerococcus tetradius
caactatataaagcttttaa

SEQ ID NO: 46464 - DNA, 20 bp, Prevotella melaninogenica
attgagtgcttgcactcaat

SEQ ID NO: 46465 - DNA, 20 bp, Rothia mucilaginosa
ggggcttaaccccgtgtatt

SEQ ID NO: 46466 - DNA, 20 bp, Alcaligenes faecalis
tggcagagaagaaaaggtac

SEQ ID NO: 46467 - DNA, 20 bp, Helcococcus kunzii
aggaaagtagcgaacgggtg

SEQ ID NO: 46468 - DNA, 20 bp, Corynebacterium glucuronolyticum
ggttggtgtggtggaaaggt

SEQ ID NO: 46469 - DNA, 20 bp, Lactococcus raffinolactis
gtgtgcattggaaactgtta

SEQ ID NO: 46470 - DNA, 20 bp, Corynebacterium glucuronolyticum
gcgaaagccagtctcagttc

SEQ ID NO: 46471 - DNA, 20 bp, Streptococcus hyovaginalis
tggaaagtttactctgtgac

SEQ ID NO: 46472 - DNA, 20 bp, Porphyromonas endodontalis
ataacccggtgaaagtcgga

SEQ ID NO: 46473 - DNA, 20 bp, Bacteroides forsythus
ctctacagcgaaagcgttaa

SEQ ID NO: 46474 - DNA, 20 bp, Streptococcus gordonii
accgtagcttgctacaccat

SEQ ID NO: 46475 - DNA, 20 bp, Porphyromonas endodontalis
ttattgattacagatgggca

SEQ ID NO: 46476 - DNA, 20 bp, Streptococcus gordonii
acgcacagtttataccgtag

SEQ ID NO: 46477 - DNA, 20 bp, Paenibacillus peoriae
gtcgagcggggttgtttaga

SEQ ID NO: 46478 - DNA, 20 bp, Pseudoramibacter alactolyticus
tcgaacgagaaggttttgaa

SEQ ID NO: 46479 - DNA, 20 bp, Clostridium paraputrificum
atgtgggaagtcccttcggg

SEQ ID NO: 46480 - DNA, 20 bp, Streptococcus sp.
gataattaattgaaagatgc

SEQ ID NO: 46481 - DNA, 20 bp, Alcaligenes faecalis
tggcagagaagaaaaggtat

SEQ ID NO: 46482 - DNA, 20 bp, Methylobacterium extorquens
ggcaccttcgggtgtcagtg

SEQ ID NO: 46483 - DNA, 20 bp, Staphylococcus aureus
cggacgagaagcttgcttct

SEQ ID NO: 46484 - DNA, 20 bp, Peptostreptococcus anaerobius
gttagcctccgaaactggaa

SEQ ID NO: 46485 - DNA, 20 bp, Sporosarcina pasteurii
tctgaaagacggcttcggct

SEQ ID NO: 46486 - DNA, 20 bp, Clostridium cadaveris
cataaaactcgtcccagttc

SEQ ID NO: 46487 - DNA, 20 bp, Anaerococcus prevotii
aacctcaaaaagtctttccc

SEQ ID NO: 46488 - DNA, 20 bp, Bacteroides capilosus
gggctcaacctgtggcctgc

SEQ ID NO: 46489 - DNA, 20 bp, Burkholderia multivorans
gaaatccctggctctaatac

SEQ ID NO: 46490 - DNA, 20 bp, Eggerthella lenta
cgagggctcaacccccggcc

SEQ ID NO: 46491 - DNA, 20 bp, Campylobacter lari
aagaaccatgacggtaccta

SEQ ID NO: 46492 - DNA, 20 bp, Anaerococcus tetradius
tgaggtatggaagggaaagt

SEQ ID NO: 46493 - DNA, 20 bp, Clostridium septicum
tatcaactccttccgtgccg

SEQ ID NO: 46494 - DNA, 20 bp, Clostridium innocuum
tagctaaaaccggataggta

SEQ ID NO: 46495 - DNA, 20 bp, Bacteroides fragilis
ttccgcatggtttcattatt

SEQ ID NO: 46496 - DNA, 20 bp, Weissella paramesenteroides
ataagagaagaacggcactg

SEQ ID NO: 46497 - DNA, 20 bp, Clostridium septicum
gcgaggggagtttcttcgga

SEQ ID NO: 46498 - DNA, 20 bp, Bacillus sp
tgcttggcctcacggcttcg

SEQ ID NO: 46499 - DNA, 20 bp, Actinomyces odontolyticus
ttgacatgcacggcggcact

SEQ ID NO: 46500 - DNA, 20 bp, Facklamia ignava
tgttcctttcaacgcgagtg

SEQ ID NO: 46501 - DNA, 20 bp, Peptoniphilus indolicus
agagcgggcaagctagcgat

SEQ ID NO: 46502 - DNA, 20 bp, Bacillus flexus
gtacaagagtaactgcttgt

SEQ ID NO: 46503 - DNA, 20 bp, Chryseobacterium meningosepticum
gtgtaagtagctgaaggtac

SEQ ID NO: 46504 - DNA, 20 bp, Brevibacillus choshinensis
ttggggactccaatcctcag

SEQ ID NO: 46505 - DNA, 20 bp, Brevundimonas vesicularis
tgagagaggtgtgtggaact

SEQ ID NO: 46506 - DNA, 20 bp, Pasteurella trehalosi
tgataaatcaaccgcctggg

SEQ ID NO: 46507 - DNA, 20 bp, Enterococcus durans
atgcaagtcgtacgcttctt

SEQ ID NO: 46508 - DNA, 20 bp, Pseudoramibacter alactolyticus
gagcctagagataggaagtt

SEQ ID NO: 46509 - DNA, 20 bp, Kingella denitrificans
tagtgggggataaccaatcg

SEQ ID NO: 46510 - DNA, 20 bp, Bacillus lentus
aaccaacaaaaagcaagctt

SEQ ID NO: 46511 - DNA, 20 bp, Aeromonas hydrophila
cctaatacgtatcaactgtg

SEQ ID NO: 46512 - DNA, 20 bp, Leptotrichia buccalis
aacgtttagccaatctttaa

SEQ ID NO: 46513 - DNA, 20 bp, Neisseria subflava
tgaactgggtgactcgagtg

SEQ ID NO: 46514 - DNA, 20 bp, Actinomyces bovis
cagcgaagcagcgatgcgga

SEQ ID NO: 46515 - DNA, 20 bp, Pediococcus pentosaceus
attttaacacgaagtgagtg

SEQ ID NO: 46516 - DNA, 20 bp, Fusobacterium nucleatum
agagagttgcaaagccgtga

SEQ ID NO: 46517 - DNA, 20 bp, Prevotella disiens
atgttgaggtccttcgggac

SEQ ID NO: 46518 - DNA, 20 bp, Campylobacter lari
ttgttgctgtgctagtcacg

SEQ ID NO: 46519 - DNA, 20 bp, Bacillus alcalophilus
gggctcaaccccgaggggtc

SEQ ID NO: 46520 - DNA, 20 bp, Moraxella osloensis
ttgctagagatgattagtgg

SEQ ID NO: 46521 - DNA, 20 bp, Prevotella loescheii
cctggggagtacgccggcaa

SEQ ID NO: 46522 - DNA, 20 bp, Methylobacterium mesophilicum
ggggagagattcccagtcca

SEQ ID NO: 46523 - DNA, 20 bp, Streptococcus anginosus
atggaaagttcatactgtga

SEQ ID NO: 46524 - DNA, 20 bp, Bacillus coagulans
tcttcggacctcacgccacc

SEQ ID NO: 46525 - DNA, 20 bp, Peptoniphilus indolicus
cgagctaaccgcaaggaagc

SEQ ID NO: 46526 - DNA, 20 bp, Neisseria elongata
ttctgctgacggtacctaaa

SEQ ID NO: 46527 - DNA, 20 bp, Comamonas testosteroni
ttcgggccttgtgctactag

SEQ ID NO: 46528 - DNA, 20 bp, Chryseobacterium meningosepticum
gtaagtagctgaaggtacca

SEQ ID NO: 46529 - DNA, 20 bp, Porphyromonas endodontalis
taagagtctaagcgaaagcg

SEQ ID NO: 46530 - DNA, 20 bp, Oligella ureolytica
aagtcttaggctaatacctt

SEQ ID NO: 46531 - DNA, 20 bp, Actinomyces meyeri
tcactggtcttcgcatgggg

SEQ ID NO: 46532 - DNA, 20 bp, Fusobacterium nucleatum
gagagtcgcaaagctgtgaa

SEQ ID NO: 46533 - DNA, 20 bp, Aerococcus christensenii
atcgatggccttgcggtgca

SEQ ID NO: 46534 - DNA, 20 bp, Enterobacter cloacae
cggggaggaaggcgacaggg

SEQ ID NO: 46535 - DNA, 20 bp, Bacillus marinus
ctagaggggtcagaggatgt

SEQ ID NO: 46536 - DNA, 20 bp, Clostridium paraputrificum
gaattaccatgtaatgtggg

SEQ ID NO: 46537 - DNA, 20 bp, Facklamia ignava
gagaagaatagcctgtagag

SEQ ID NO: 46538 - DNA, 20 bp, Veillonella atypica
gagcaaacccgagaaacact

SEQ ID NO: 46539 - DNA, 20 bp, Campylobacter curvus
atcatctagagatagaagag

SEQ ID NO: 46540 - DNA, 20 bp, Streptococcus gordonii
cttgctacaccatagactgt

SEQ ID NO: 46541 - DNA, 20 bp, Comamonas terrigena
taataccctggagtcatgac

SEQ ID NO: 46542 - DNA, 20 bp, Tissierella praeacuta
ctgaaaggcttgagttaagg

SEQ ID NO: 46543 - DNA, 20 bp, Staphylococcus carnosus
gtaactatgcgcaccttgac

SEQ ID NO: 46544 - DNA, 20 bp, Enterococcus casseliflavus
ataccgtataacactatttt

SEQ ID NO: 46545 - DNA, 20 bp, Bacteroides thetaiotaomicron
cgggcttaaattgcatttga

SEQ ID NO: 46546 - skipped

SEQ ID NO: 46547 - DNA, 20 bp, Propionibacterium freudenreichii
tgacttcggtatagctccag

SEQ ID NO: 46548 - DNA, 20 bp, Bacteroides uniformis
ggcagcatgaacttagcttg

SEQ ID NO: 46549 - DNA, 20 bp, Anaerococcus prevotii
atatcttgagaagagtagag

SEQ ID NO: 46550 - DNA, 20 bp, Clostridium septicum
cgaggggagtttcttcggaa

SEQ ID NO: 46551 - DNA, 20 bp, Corynebacterium coyleae
tcctgcttgcaggggtactc

SEQ ID NO: 46552 - DNA, 20 bp, Lactococcus lactis
gtacttgtaccgactggatg

SEQ ID NO: 46553 - DNA, 20 bp, Facklamia hominis
gacggcttcggctgtcgcaa

SEQ ID NO: 46554 - DNA, 20 bp, Bacillus lentus
cgctaaccaacaaaaagcaa

SEQ ID NO: 46555 - DNA, 20 bp, Corynebacterium hoagii
cgggggttggaaaggtttac

SEQ ID NO: 46556 - DNA, 20 bp, Serratia marcescens
gagcttaatacgctcatcaa

SEQ ID NO: 46557 - DNA, 20 bp, Actinomyces naeslundii
acgggatattctgggtctgt

SEQ ID NO: 46558 - DNA, 20 bp, Clostridium botulinum
ggagctaaactataaaacca

SEQ ID NO: 46559 - DNA, 20 bp, Acinetobacter radioresistens
aggcggccaattaagtcaaa

SEQ ID NO: 46560 - DNA, 20 bp, Moraxella lacunata
gatttaagtcgggaactcta

SEQ ID NO: 46561 - DNA, 20 bp, Corynebacterium amycolatum
gtggatgctgtggtggaaag

SEQ ID NO: 46562 - DNA, 20 bp, Streptococcus gordonii
aacgcacagtttataccgta

SEQ ID NO: 46563 - DNA, 20 bp, Actinomyces bovis
agtatgcgcgcaagcgtaaa

SEQ ID NO: 46564 - DNA, 20 bp, Budvicia aquatica
ttgtgggcatgacccgtggc

SEQ ID NO: 46565 - DNA, 20 bp, Corynebacterium coyleae
tgtacacaccgcccgtacac

SEQ ID NO: 46566 - DNA, 20 bp, Listeria ivanovii
actttgaaagatggtttcgg

SEQ ID NO: 46567 - DNA, 20 bp, Brevibacterium casei
gagaggcgaacccgtgaggg

SEQ ID NO: 46568 - DNA, 20 bp, Sporosarcina pasteurii
gacggcttcggctgtctctg

SEQ ID NO: 46569 - DNA, 20 bp, Bacillus badius
gtccgtaccttgacggtacc

SEQ ID NO: 46570 - DNA, 20 bp, Neisseria meningitidis
cctccctctgacacactcga

SEQ ID NO: 46571 - DNA, 20 bp, Streptococcus macacae
cctatcagatggacctgcgt

SEQ ID NO: 46572 - DNA, 20 bp, Helcococcus kunzii
gaaagatggtctcgcgtctg

SEQ ID NO: 46573 - DNA, 20 bp, Facklamia ignava
ggaaactggtcaacttgagt

SEQ ID NO: 46574 - DNA, 20 bp, Weissella paramesenteroides
acggcactgagagtaactgt

SEQ ID NO: 46575 - DNA, 20 bp, Peptostreptococcus anaerobius
ggtgcgtaggtggtctttca

SEQ ID NO: 46576 - DNA, 20 bp, Paenibacillus pabuli
gcaacctgccctcaagtttg

SEQ ID NO: 46577 - DNA, 20 bp, Anaerococcus tetradius
agttccttacttcttcggaa

SEQ ID NO: 46578 - DNA, 20 bp, Clostridium ramosum
atatgagatacaggtggtgc

SEQ ID NO: 46579 - DNA, 20 bp, Staphylococcus auricularis
agtcggtagagtaacctttt

SEQ ID NO: 46580 - DNA, 20 bp, Paenibacillus pabuli
gaacgaatcctaaaaagccg

SEQ ID NO: 46581 - DNA, 20 bp, Staphylococcus aureus
acggacgagaagcttgcttc

SEQ ID NO: 46582 - DNA, 20 bp, Peptostreptococcus anaerobius
tgaaagatgagcggcggacg

SEQ ID NO: 46583 - DNA, 20 bp, Corynebacterium glucuronolyticum
tgatctgccctgcactgggg

SEQ ID NO: 46584 - DNA, 20 bp, Corynebacterium urealyticum
aaactggagtgctgtagggg

SEQ ID NO: 46585 - DNA, 20 bp, Bacillus alcalophilus
agtctgatgtgaaatatcgg

SEQ ID NO: 46586 - DNA, 20 bp, Streptococcus thermophilus
aggtgttggatcctttccgg

SEQ ID NO: 46587 - DNA, 20 bp, Facklamia ignava
taaagcactgttatcagaga

SEQ ID NO: 46588 - DNA, 20 bp, Bacteroides thetaiotaomicron
ttccattaggcagttggtga

SEQ ID NO: 46589 - DNA, 20 bp, Acinetobacter radioresistens
actttaggatagtggacgtt

SEQ ID NO: 46590 - DNA, 20 bp, Streptococcus canis
caagtagaacgctgaggaca

SEQ ID NO: 46591 - DNA, 20 bp, Peptoniphilus indolicus
ggacagtattacaggtggtg

SEQ ID NO: 46592 - DNA, 20 bp, Bacteroides ovatus
gcagttgaaactggcagtct

SEQ ID NO: 46593 - DNA, 20 bp, Vagococcus fluvialis
ggagagtaactgttcccacc

SEQ ID NO: 46594 - DNA, 20 bp, Corynebacterium falsenii
ttctacgatttccgtgccgt

SEQ ID NO: 46595 - DNA, 20 bp, Fusobacterium mortiferum
gtttcgcatgaaattcatat

SEQ ID NO: 46596 - DNA, 20 bp, Bacteroides forsythus
acgcgtatgtaacctgcccg

SEQ ID NO: 46597 - DNA, 20 bp, Facklamia ignava
tccagtcgcatgactggaat

SEQ ID NO: 46598 - DNA, 20 bp, Prevotella denticola
aaattgcatccaatcttgaa

SEQ ID NO: 46599 - DNA, 20 bp, Bacillus coagulans
cgtaaaactctgttgccggg

SEQ ID NO: 46600 - DNA, 20 bp, Streptococcus bovis
gactactttagcttgctaga

SEQ ID NO: 46601 - DNA, 20 bp, Dermabacter hominis
gccgatggcccaagctttat

SEQ ID NO: 46602 - DNA, 20 bp, Tissierella praeacuta
gtcgtaaagttctgtcctaa

SEQ ID NO: 46603 - DNA, 20 bp, Anaerococcus prevotii
ggattaataccaaatgaaat

SEQ ID NO: 46604 - DNA, 20 bp, Moraxella  catarrhalis
ttgcttctgatacttagtgg

SEQ ID NO: 46605 - DNA, 20 bp, Campylobacter curvus
taagctagtcttggcagtaa

SEQ ID NO: 46606 - DNA, 20 bp, Chromobacterium violaceum
gtcggaatgtaccgtgtaat

SEQ ID NO: 46607 - DNA, 20 bp, Streptococcus constellatus
taccgcataagaacatttac

SEQ ID NO: 46608 - DNA, 20 bp, Cardiobacterium hominis
agcgcacgcaggcggttgcc

SEQ ID NO: 46609 - DNA, 20 bp, Clostridium difficile
tctaaccttttggaagaagt

SEQ ID NO: 46610 - DNA, 20 bp, Gemella haemolysans
ataagagatcagtgctgcag

SEQ ID NO: 46611 - DNA, 20 bp, Pseudoramibacter alactolyticus
gaaaacatgacggtacccaa

SEQ ID NO: 46612 - DNA, 20 bp, Veillonella atypica
ttgcttctatcaatcttagt

SEQ ID NO: 46613 - DNA, 20 bp, Bacteroides fragilis
gactggtaagtcagttgtga

SEQ ID NO: 46614 - DNA, 20 bp, Actinomyces naeslundii
ggctccggagacggggtttc

SEQ ID NO: 46615 - DNA, 20 bp, Haemophilus influenzae
ttgaggaaggttgatgtgtt

SEQ ID NO: 46616 - DNA, 20 bp, Lactococcus garvieae
ggagggcgcttcctaaggta

SEQ ID NO: 46617 - DNA, 20 bp, Lactococcus lactis
taaacacaagttttaagttt

SEQ ID NO: 46618 - DNA, 20 bp, Corynebacterium auris
tgtgcgatactgtgaggtgg

SEQ ID NO: 46619 - DNA, 20 bp, Clostridium tetani
catctagagtacaggagagg

SEQ ID NO: 46620 - DNA, 20 bp, Brevibacillus choshinensis
cttctttcagaccgcatggt

SEQ ID NO: 46621 - DNA, 20 bp, Clostridium clostridiiforme
cgaagcaagtctgaagtgaa

SEQ ID NO: 46622 - DNA, 20 bp, Staphylococcus felis
gcactctaggctgactgccg

SEQ ID NO: 46623 - DNA, 20 bp, Moraxella lacunata
cagcgatttaagtcgggaac

SEQ ID NO: 46624 - DNA, 20 bp, Streptococcus mitis
catgacatttgcttaaaagg

SEQ ID NO: 46625 - DNA, 20 bp, Actinomyces bovis
aagaacgataggaagaggga

SEQ ID NO: 46626 - DNA, 20 bp, Bacillus fusiformis
caagtacagtagtaactggc

SEQ ID NO: 46627 - DNA, 20 bp, Gemella morbillorum
agccaacctcataaaactat

SEQ ID NO: 46628 - DNA, 20 bp, Anaerococcus prevotii
acagaacccttcggggtgaa

SEQ ID NO: 46629 - DNA, 20 bp, Actinomyces neuii
ttggtgtctacagagggttg

SEQ ID NO: 46630 - DNA, 20 bp, Morganella morganii
gcatctgatactggtcagct

SEQ ID NO: 46631 - DNA, 20 bp, Bacteroides uniformis
gcggacgcttaagtcagttg

SEQ ID NO: 46632 - DNA, 20 bp, Campylobacter curvus
tgtatactagttgttgctaa

SEQ ID NO: 46633 - DNA, 20 bp, Weeksella virosa
caggagctacctagggtaaa

SEQ ID NO: 46634 - DNA, 20 bp, Acinetobacter baumannii
cgatactggtgagctagagt

SEQ ID NO: 46635 - DNA, 20 bp, Oligella urethralis
cactcgccatcaagagagca

SEQ ID NO: 46636 - DNA, 20 bp, Campylobacter rectus
gctaatctgccctacactag

SEQ ID NO: 46637 - DNA, 20 bp, Helcococcus kunzii
gtgagagcaagcgaatcgca

SEQ ID NO: 46638 - DNA, 20 bp, Streptococcus parasanguinis
gcaaatgcatcactaagaga

SEQ ID NO: 46639 - DNA, 20 bp, Streptococcus mitis
atgttgcatgacatttgctt

SEQ ID NO: 46640 - DNA, 20 bp, Oligella urethralis
aatatgcggtattagctacg

SEQ ID NO: 46641 - DNA, 20 bp, Stenotrophomonas maltophilia
actgcagtggaaactggacg

SEQ ID NO: 46642 - DNA, 20 bp, Dolosigranulum pigrum
acgtgaggaacttgcccatg

SEQ ID NO: 46643 - DNA, 20 bp, Bacillus sp
acatcctctgacggccctag

SEQ ID NO: 46644 - DNA, 20 bp, Actinomyces meyeri
ctggtcttcgcatgggggtt

SEQ ID NO: 46645 - DNA, 20 bp, Streptococcus acidominimus
aatttaaaaggagcaacagc

SEQ ID NO: 46646 - DNA, 20 bp, Arcanobacterium bernardiae
gtaaactcctttcagtacag

SEQ ID NO: 46647 - DNA, 20 bp, Brochothrix campestris
aactgttcaccccttgacgg

SEQ ID NO: 46648 - DNA, 20 bp, Prevotella loescheii
cgggcttgaactgcggcgga

SEQ ID NO: 46649 - DNA, 20 bp, Clostridium ramosum
tgaagcaaaacccataaaac

SEQ ID NO: 46650 - DNA, 20 bp, Enterococcus dispar
gcgtcacttgaggatggacc

SEQ ID NO: 46651 - DNA, 20 bp, Streptococcus porcinus
cgcatgaaagtagaagaccc

SEQ ID NO: 46652 - DNA, 20 bp, Bacillus pumilus
atagttccttgaaccgcatg

SEQ ID NO: 46653 - DNA, 20 bp, Streptococcus infantarius
aactcttcaaactttagcaa

SEQ ID NO: 46654 - DNA, 20 bp, Corynebacterium glucuronolyticum
ataccctataggaccgcatc

SEQ ID NO: 46655 - DNA, 20 bp, Anaerococcus prevotii
gggttcgcaggcggaaatgc

SEQ ID NO: 46656 - DNA, 20 bp, Ralstonia paucula
aaaggcctcgcgcagcagga

SEQ ID NO: 46657 - DNA, 20 bp, Peptostreptococcus anaerobius
ccgcaaggaggaagtcgtcg

SEQ ID NO: 46658 - DNA, 20 bp, Pseudoramibacter alactolyticus
gtgagagaaccgcaaggact

SEQ ID NO: 46659 - DNA, 20 bp, Pediococcus dextrinicus
cgccaatcctagagatagga

SEQ ID NO: 46660 - DNA, 20 bp, Facklamia languida
taaggatggctccgcggtgc

SEQ ID NO: 46661 - DNA, 20 bp, Helcococcus ovis
gaagataatgactgtaacta

SEQ ID NO: 46662 - DNA, 20 bp, Bacillus simplex
cggatacgttcttttctcgc

SEQ ID NO: 46663 - DNA, 20 bp, Streptococcus infantarius
gcttgctaaagtttgaagag

SEQ ID NO: 46664 - DNA, 20 bp, Leptotrichia buccalis
cctagccaaggcggacgggt

SEQ ID NO: 46665 - DNA, 20 bp, Bacteroides distasonis
ccttacccgggtttgaacgc

SEQ ID NO: 46666 - DNA, 20 bp, Clostridium histolyticum
catcccgagaatcctgtgga

SEQ ID NO: 46667 - DNA, 20 bp, Moraxella lacunata
gcgagcgtaggtggtcattt

SEQ ID NO: 46668 - DNA, 20 bp, Tetragenococcus halophilus
taacacgtggggaacctatc

SEQ ID NO: 46669 - DNA, 20 bp, Enterococcus cecorum
atttaccgcatggtagatgg

SEQ ID NO: 46670 - DNA, 20 bp, Leptotrichia buccalis
ctgggtgtgggcatgaagag

SEQ ID NO: 46671 - DNA, 20 bp, Streptococcus constellatus
catttactgcatggtagatg

SEQ ID NO: 46672 - DNA, 20 bp, Alcaligenes faecalis
cgttaggccttagtagcgca

SEQ ID NO: 46673 - DNA, 20 bp, Neisseria subflava
tgctaacatcagcggctgat

SEQ ID NO: 46674 - DNA, 20 bp, Methylobacterium mesophilicum
ttttggggaaaggcttgctg

SEQ ID NO: 46675 - DNA, 20 bp, Delftia acidovorans
ggaattagttttctcagtaa

SEQ ID NO: 46676 - DNA, 20 bp, Leptotrichia buccalis
agcgagactgcctgcgaaga

SEQ ID NO: 46677 - DNA, 20 bp, Streptococcus agalactiae
gttatttaaaaggagcaatt

SEQ ID NO: 46678 - DNA, 20 bp, Helcococcus kunzii
tacctcgtgagagcaagcga

SEQ ID NO: 46679 - DNA, 20 bp, Tissierella praeacuta
gcgtgagaaacctgcctttt

SEQ ID NO: 46680 - DNA, 20 bp, Anaerococcus tetradius
gtacgtaggcggataagcaa

SEQ ID NO: 46681 - DNA, 20 bp, Prevotella oris
gcgcgaactggtccacttga

SEQ ID NO: 46682 - DNA, 20 bp, Globicatella sanguinis
gctaactcgcaagagcatgc

SEQ ID NO: 46683 - DNA, 20 bp, Streptococcus hyovaginalis
cggggcactggtgacaggtg

SEQ ID NO: 46684 - DNA, 20 bp, Paenibacillus macerans
gactgggataacattcggaa

SEQ ID NO: 46685 - DNA, 20 bp, Proteus vulgaris
actgtggcttctggagctaa

SEQ ID NO: 46686 - DNA, 20 bp, Capnocytophaga gingivalis
tctgtgaagttcttggaatg

SEQ ID NO: 46687 - DNA, 20 bp, Bacteroides uniformis
aatttcggtcatcgatgggg

SEQ ID NO: 46688 - DNA, 20 bp, Rothia mucilaginosa
ccggatacgaccaatctccg

SEQ ID NO: 46689 - DNA, 20 bp, Streptococcus equi
atcatgtgacggtaactaac

SEQ ID NO: 46690 - DNA, 20 bp, Helcococcus ovis
ggcgactttctggaatctaa

SEQ ID NO: 46691 - DNA, 20 bp, Fusobacterium varium
cagactgggacaacatttgg

SEQ ID NO: 46692 - DNA, 20 bp, Peptoniphilus indolicus
caaagagcgggcaagctagc

SEQ ID NO: 46693 - DNA, 20 bp, Streptococcus hyovaginalis
ttataagcgaagaacgggag

SEQ ID NO: 46694 - DNA, 20 bp, Streptococcus parasanguinis
gatgttgacttgaaaggtgc

SEQ ID NO: 46695 - DNA, 20 bp, Campylobacter rectus
cttcgctagtcgaggcagta

SEQ ID NO: 46696 - DNA, 20 bp, Anaerococcus prevotii
ggtaagtggaatttttagtg

SEQ ID NO: 46697 - DNA, 20 bp, Bacteroides stercoris
acgtgatgctaatcccaaaa

SEQ ID NO: 46698 - DNA, 20 bp, Fusobacterium nucleatum
attttaaggcatcttagaat

SEQ ID NO: 46699 - DNA, 20 bp, Bacteroides thetaiotaomicron
agcatttcagtttgcttgca

SEQ ID NO: 46700 - DNA, 20 bp, Abiotrophia defectiva
tagagtttttcttcggaacg

SEQ ID NO: 46701 - DNA, 20 bp, Prevotella melaninogenica
cgtaggccggagattaagtg

SEQ ID NO: 46702 - DNA, 20 bp, Prevotella melaninogenica
gtctgacttgcagcgcatac

SEQ ID NO: 46703 - DNA, 20 bp, Streptococcus thoraltensis
taaagctctgttataagcga

SEQ ID NO: 46704 - DNA, 20 bp, Actinomyces bovis
ggcggtttatcaagtttatg

SEQ ID NO: 46705 - DNA, 20 bp, Alicyclobacillus acidocaldarius
gtccccgcctcaacgcgctg

SEQ ID NO: 46706 - DNA, 20 bp, Bacteroides thetaiotaomicron
aagggagcgtaggtggacag

SEQ ID NO: 46707 - DNA, 20 bp, Bacteroides uniformis
tcgatagttaccatcaggtt

SEQ ID NO: 46708 - DNA, 20 bp, Anaerococcus tetradius
aagaataaggtccggctaaa

SEQ ID NO: 46709 - DNA, 20 bp, Bacteroides capilosus
gtaggcgggactgcaagtca

SEQ ID NO: 46710 - DNA, 20 bp, Neisseria flavescens
ctaatatcgacagctgatga

SEQ ID NO: 46711 - DNA, 20 bp, Pseudoramibacter alactolyticus
gagtaaagccttatattatg

SEQ ID NO: 46712 - DNA, 20 bp, Clostridium tetani
aactgaggaagtcccttcgg

SEQ ID NO: 46713 - DNA, 20 bp, Brevibacillus choshinensis
cgcgagagtgcgcgaatccc

SEQ ID NO: 46714 - DNA, 20 bp, Gemella morbillorum
tagggaagaatggatatgta

SEQ ID NO: 46715 - DNA, 20 bp, Propionibacterium freudenreichii
agttcggctggggactcatt

SEQ ID NO: 46716 - DNA, 20 bp, Shewanella algae
tcgggccttgcgctgatgga

SEQ ID NO: 46717 - DNA, 20 bp, Leptotrichia buccalis
cagacaagtctggggtgaaa

SEQ ID NO: 46718 - DNA, 20 bp, Gemella sanguinis
gaagaatgattgtatagtaa

SEQ ID NO: 46719 - DNA, 20 bp, Fusobacterium varium
aataccggatattatgactg

SEQ ID NO: 46720 - DNA, 20 bp, Campylobacter concisus
tgtggggctggtgtacaggt

SEQ ID NO: 46721 - DNA, 20 bp, Haemophilus actinemycetemcomitans
aaccagcgatggggagtgaa

SEQ ID NO: 46722 - DNA, 20 bp, Streptococcus constellatus
catgcaagtagaccgcacag

SEQ ID NO: 46723 - DNA, 20 bp, Alcaligenes faecalis
gagatttggccgtgctcgca

SEQ ID NO: 46724 - DNA, 20 bp, Streptococcus dysgalactiae
gaagaatgatggtgggagtg

SEQ ID NO: 46725 - DNA, 20 bp, Prevotella melaninogenica
tcaatggacgtcgaccggcg

SEQ ID NO: 46726 - DNA, 20 bp, Paenibacillus glucanolyticus
tccctctgaatctgctagag

SEQ ID NO: 46727 - DNA, 20 bp, Vibrio mimicus
cggagacgctggagtgcctt

SEQ ID NO: 46728 - DNA, 20 bp, Bacteroides ovatus
aggcggctacctggcgacag

SEQ ID NO: 46729 - DNA, 20 bp, Streptococcus equi
taaccatttaaaaggagcaa

SEQ ID NO: 46730 - DNA, 20 bp, Atopobium parvulum
taaagcaccttcgggtgtgt

SEQ ID NO: 46731 - DNA, 20 bp, Helcococcus kunzii
ttggcaatacccgaagtcgt

SEQ ID NO: 46732 - DNA, 20 bp, Bacteroides fragilis
tcagtcttgagtacagtaga

SEQ ID NO: 46733 - DNA, 20 bp, Propionibacterium freudenreichii
gagatgggcgtgcctttttg

SEQ ID NO: 46734 - DNA, 20 bp, Streptococcus thoraltensis
acaacgagttgcgagctggt

SEQ ID NO: 46735 - DNA, 20 bp, Listeria innocua
ataccgaatgatagagtgtg

SEQ ID NO: 46736 - DNA, 20 bp, Lactococcus lactis
cactcaaagatgatcccgcg

SEQ ID NO: 46737 - DNA, 20 bp, Streptococcus equi
ttcggtacattggagacagg

SEQ ID NO: 46738 - DNA, 20 bp, Neisseria meningitidis
gagagagaaagcaggggact

SEQ ID NO: 46739 - DNA, 20 bp, Bacillus pallidus
ggtatccaccctttagtgct

SEQ ID NO: 46740 - DNA, 20 bp, Clostridium clostridiiforme
ctcttcggagcaatggagac

SEQ ID NO: 46741 - DNA, 20 bp, Anaerococcus prevotii
atggaagatacaaagggaag

SEQ ID NO: 46742 - DNA, 20 bp, Porphyromonas endodontalis
cagctcaactgtagtcttgc

SEQ ID NO: 46743 - DNA, 20 bp, Pseudoramibacter alactolyticus
atcatgaaaactccggtgcc

SEQ ID NO: 46744 - DNA, 20 bp, Bacteroides uniformis
taggcggacgcttaagtcag

SEQ ID NO: 46745 - DNA, 20 bp, Pasteurella trehalosi
aatatcgagagattaaaggg

SEQ ID NO: 46746 - DNA, 20 bp, Campylobacter sputorum
tggcagtaatccacctaacg

SEQ ID NO: 46747 - DNA, 20 bp, Kingella denitrificans
tagggaagaaaagggaagtg

SEQ ID NO: 46748 - DNA, 20 bp, Staphylococcus capitis
aggcctgcagcttgctgcgg

SEQ ID NO: 46749 - DNA, 20 bp, Proteus mirabilis
gataaggttaatacccttat

SEQ ID NO: 46750 - DNA, 20 bp, Lactobacillus casei
ggttcttggctgaaagatgg

SEQ ID NO: 46751 - DNA, 20 bp, Serratia proteamaculans
gcacattgcattgacgttac

SEQ ID NO: 46752 - DNA, 20 bp, Aerococcus christensenii
taaccgtggaagtgcattgg

SEQ ID NO: 46753 - DNA, 20 bp, Lactococcus lactis
gtgagagtggaaagctcatc

SEQ ID NO: 46754 - DNA, 20 bp, Chromobacterium violaceum
cagccgacgtctgattagct

SEQ ID NO: 46755 - DNA, 20 bp, Vibrio fluvialis
aacattgaaccttcggggga

SEQ ID NO: 46756 - DNA, 20 bp, Corynebacterium group F
gcggatcgccgcagagatgt

SEQ ID NO: 46757 - DNA, 20 bp, Alicyclobacillus acidocaldarius
ccgagcaacagagctttaca

SEQ ID NO: 46758 - DNA, 20 bp, Kingella denitrificans
ggtgcttgcacctgccggcg

SEQ ID NO: 46759 - DNA, 20 bp, Brevibacillus thermoruber
agggtaagccaatctcttaa

SEQ ID NO: 46760 - DNA, 20 bp, Clostridium paraputrificum
cgtaagggaggaagccacct

SEQ ID NO: 46761 - DNA, 20 bp, Campylobacter rectus
ctaatctgccctacactaga

SEQ ID NO: 46762 - DNA, 20 bp, Veillonella dispar
tgttaatcgggacgaaaggc

SEQ ID NO: 46763 - DNA, 20 bp, Shigella dysenteriae
tcgaacggtaacaggaaagc

SEQ ID NO: 46764 - DNA, 20 bp, Staphylococcus carnosus
caatgaaagacggttttgct

SEQ ID NO: 46765 - DNA, 20 bp, Prevotella intermedia
actcaagtcctacagttcca

SEQ ID NO: 46766 - DNA, 20 bp, Eggerthella lenta
gacatggacgtgaagccggg

SEQ ID NO: 46767 - DNA, 20 bp, Streptococcus gordonii
gcaagtagaacgcacagttt

SEQ ID NO: 46768 - DNA, 20 bp, Moraxella osloensis
gaactgcatgtgatactggt

SEQ ID NO: 46769 - DNA, 20 bp, Streptococcus bovis
gagtagaaggagttgcgaac

SEQ ID NO: 46770 - DNA, 20 bp, Mannheimia haemolytica
aggactaaagggtgggacca

SEQ ID NO: 46771 - DNA, 20 bp, Neisseria gonorrhoeae
cacagggaagcttgcttctc

SEQ ID NO: 46772 - DNA, 20 bp, Streptococcus thoraltensis
ggtagcttatcagaaaggga

SEQ ID NO: 46773 - DNA, 20 bp, Bacteroides forsythus
taacgataaaattgccgttg

SEQ ID NO: 46774 - DNA, 20 bp, Paenibacillus lautus
ggaataatgaaagacggagc

SEQ ID NO: 46775 - DNA, 20 bp, Bacillus cereus
gctctcaagaagttagcggc

SEQ ID NO: 46776 - DNA, 20 bp, Aerococcus viridans
cgaaggcgacattctggtct

SEQ ID NO: 46777 - DNA, 20 bp, Budvicia aquatica
gcatgacccgtggcttccgg

SEQ ID NO: 46778 - DNA, 20 bp, Bacillus megaterium
accggataggatcttctcct

SEQ ID NO: 46779 - DNA, 20 bp, Streptococcus hyovaginalis
cgaagaacgggagtaagagt

SEQ ID NO: 46780 - DNA, 20 bp, Leuconostoc lactis
atcaggtagtgacggtatcc

SEQ ID NO: 46781 - DNA, 20 bp, Cardiobacterium hominis
tgccttttgctgggggataa

SEQ ID NO: 46782 - DNA, 20 bp, Bacillus lentus
tctgggattcgctcatgcgt

SEQ ID NO: 46783 - DNA, 20 bp, Corynebacterium coyleae
agggtgtgctaatcgctgaa

SEQ ID NO: 46784 - DNA, 20 bp, Actinomyces bovis
agtgaagaggagcttgctcc

SEQ ID NO: 46785 - DNA, 20 bp, Campylobacter rectus
ttttcttgggaaagaattat

SEQ ID NO: 46786 - DNA, 20 bp, Shewanella algae
gcgaggaggaaagggtgtaa

SEQ ID NO: 46787 - DNA, 20 bp, Cardiobacterium hominis
ggcggttgcccaagtcagat

SEQ ID NO: 46788 - DNA, 20 bp, Methylobacterium mesophilicum
catggcgtgttacccagaga

SEQ ID NO: 46789 - DNA, 20 bp, Actinomyces odontolyticus
atgtggtggcatttagttgg

SEQ ID NO: 46790 - DNA, 20 bp, Neisseria gonorrhoeae
acagggaagcttgcttctcg

SEQ ID NO: 46791 - DNA, 20 bp, Chromobacterium violaceum
gtaacagggtgcttgcaccg

SEQ ID NO: 46792 - DNA, 20 bp, Arcanobacterium bernardiae
aggcaggttactgggccacc

SEQ ID NO: 46793 - DNA, 20 bp, Leptotrichia buccalis
gggtgaaaacttgcggctca

SEQ ID NO: 46794 - DNA, 20 bp, Acinetobacter genospecies 3
aagagggcggttaccacggt

SEQ ID NO: 46795 - DNA, 20 bp, Actinomyces bovis
tctttagttaccagcattaa

SEQ ID NO: 46796 - DNA, 20 bp, Streptococcus anginosus
ttgttaaggaagaacgagtg

SEQ ID NO: 46797 - DNA, 20 bp, Turicella otitidis
taggtgtgagggtcttttca

SEQ ID NO: 46798 - DNA, 20 bp, Acinetobacter genospecies 3
tagcttgctactgatcttag

SEQ ID NO: 46799 - DNA, 20 bp, Brevibacillus choshinensis
ggtcacgtacagatgggcct

SEQ ID NO: 46800 - DNA, 20 bp, Weissella paramesenteroides
atggcatatacaacgagtcg

SEQ ID NO: 46801 - DNA, 20 bp, Fusobacterium mortiferum
ctgcaggagagctttgcgtc

SEQ ID NO: 46802 - DNA, 20 bp, Bacillus lentus
cttattggttcgctcgactt

SEQ ID NO: 46803 - DNA, 20 bp, Prevotella melaninogenica
cggcattgagtgcttgcact

SEQ ID NO: 46804 - DNA, 20 bp, Bacteroides fragilis
accgtatgctaatcccaaaa

SEQ ID NO: 46805 - DNA, 20 bp, Corynebacterium jeikeium
cgctaggtgtgggggtttta

SEQ ID NO: 46806 - DNA, 20 bp, Bacteroides stercoris
cccaccaaaccgacgatgga

SEQ ID NO: 46807 - DNA, 20 bp, Streptococcus mitis
tgttgcatgacatttgctta

SEQ ID NO: 46808 - DNA, 20 bp, Streptococcus hyovaginalis
tctgtgacggtagcttatca

SEQ ID NO: 46809 - DNA, 20 bp, Veillonella atypica
ctgatctagagtatcggaga

SEQ ID NO: 46810 - DNA, 20 bp, Streptococcus parasanguinis
tgacttgaaaggtgcaaatg

SEQ ID NO: 46811 - DNA, 20 bp, Pediococcus dextrinicus
cgtaagctgtcacttttgga

SEQ ID NO: 46812 - DNA, 20 bp, Bacteroides uniformis
gaactattaaagaatttcgg

SEQ ID NO: 46813 - DNA, 20 bp, Propionibacterium freudenreichii
accgctttcatccatgacga

SEQ ID NO: 46814 - DNA, 20 bp, Gemella haemolysans
gttggtctcataagagatca

SEQ ID NO: 46815 - DNA, 20 bp, Corynebacterium group F
tgtgaggggatgctaatcgc

SEQ ID NO: 46816 - DNA, 20 bp, Yersinia ruckeri
agtgttaatagcactgaaca

SEQ ID NO: 46817 - DNA, 20 bp, Vibrio cholerae
aggtattaacttaaccacct

SEQ ID NO: 46818 - DNA, 20 bp, Porphyromonas endodontalis
gaatactagatttttgcgat

SEQ ID NO: 46819 - DNA, 20 bp, Bacteroides forsythus
gataaaattgccgttgaaac

SEQ ID NO: 46820 - DNA, 20 bp, Actinomyces turicensis
gtcaagccgcagctttgggt

SEQ ID NO: 46821 - DNA, 20 bp, Streptococcus constellatus
aggacgacgctggcggcgtg

SEQ ID NO: 46822 - DNA, 20 bp, Acinetobacter calcoaceticus
cttcagatagtggacgttac

SEQ ID NO: 46823 - DNA, 20 bp, Brevibacillus agri
ttggatcgcatgatctgaaa

SEQ ID NO: 46824 - DNA, 20 bp, Brevibacillus borstelensis
ggtggcgcaagctaccactt

SEQ ID NO: 46825 - DNA, 20 bp, Streptococcus hyovaginalis
gatttcccttcggggcactg

SEQ ID NO: 46826 - DNA, 20 bp, Anaerococcus prevotii
tgccttagacattgggatag

SEQ ID NO: 46827 - DNA, 20 bp, Bacteroides stercoris
gcgacgtggtgctaatcccg

SEQ ID NO: 46828 - DNA, 20 bp, Helcococcus ovis
taatttaagtctgaatttaa

SEQ ID NO: 46829 - DNA, 20 bp, Chromobacterium violaceum
acggtaacagggtgcttgca

SEQ ID NO: 46830 - DNA, 20 bp, Aerococcus christensenii
tcacttatcgatggccttgc

SEQ ID NO: 46831 - DNA, 20 bp, Helcococcus ovis
aacttgtatacaggtggtgc

SEQ ID NO: 46832 - DNA, 20 bp, Paenibacillus pabuli
tgaagagaactggaaagacg

SEQ ID NO: 46833 - DNA, 20 bp, Campylobacter rectus
agtcgaacggagattaagta

SEQ ID NO: 46834 - DNA, 20 bp, Bacillus alcalophilus
tgctcccagaggttagcggc

SEQ ID NO: 46835 - DNA, 20 bp, Bacillus oleronius
ggataacttttttcttcgca

SEQ ID NO: 46836 - DNA, 20 bp, Helcococcus ovis
aatgactgtaactaagaagc

SEQ ID NO: 46837 - DNA, 20 bp, Fusobacterium nucleatum
gtgtcccttcggggaaacct

SEQ ID NO: 46838 - DNA, 20 bp, Prevotella melaninogenica
gctgacgggagcgcaactga

SEQ ID NO: 46839 - DNA, 20 bp, Burkholderia gladioli
cggaaagaaatcctgagggc

SEQ ID NO: 46840 - DNA, 20 bp, Corynebacterium coyleae
tggtttccctttgtggttgg

SEQ ID NO: 46841 - DNA, 20 bp, Ochrobactrum intermedium
gggaatctacccatcactag

SEQ ID NO: 46842 - DNA, 20 bp, Fusobacterium nucleatum
gatattatgattttagggca

SEQ ID NO: 46843 - DNA, 20 bp, Streptococcus dysgalactiae
tgggagtggaaaatccacca

SEQ ID NO: 46844 - DNA, 20 bp, Nocardia asteroides
cgagcgggggaggttgcttc

SEQ ID NO: 46845 - DNA, 20 bp, Prevotella denticola
caaccacaagggacactaca

SEQ ID NO: 46846 - DNA, 20 bp, Atopobium parvulum
attaaagcaccttcgggtgt

SEQ ID NO: 46847 - DNA, 20 bp, Proteus vulgaris
tacctttgtcaattgacgtt

SEQ ID NO: 46848 - DNA, 20 bp, Alicyclobacillus acidocaldarius
cattagcgcccgtttccggg

SEQ ID NO: 46849 - DNA, 20 bp, Enterococcus casseliflavus
ttccgcatggaagaaagttg

SEQ ID NO: 46850 - DNA, 20 bp, Fusobacterium varium
cagttgggaagaagtcagtg

SEQ ID NO: 46851 - DNA, 20 bp, Weeksella virosa
gataattgagagcggcgtac

SEQ ID NO: 46852 - DNA, 20 bp, Bacteroides ovatus
ctctatgggtcgtaaacttc

SEQ ID NO: 46853 - DNA, 20 bp, Porphyromonas endodontalis
ggactgagaggttgaccccc

SEQ ID NO: 46854 - DNA, 20 bp, Facklamia hominis
tgttagagaagaacgaccgc

SEQ ID NO: 46855 - DNA, 20 bp, Enterobacter gergoviae
aggaagggagtgaggttaat

SEQ ID NO: 46856 - DNA, 20 bp, Capnocytophaga ochracea
ggtggtgaaagatgagtatg

SEQ ID NO: 46857 - DNA, 20 bp, Neisseria flavescens
ttgctaatatcgacagctga

SEQ ID NO: 46858 - DNA, 20 bp, Geobacillus thermoglucosidasius
gcttccgcttggttagcggc

SEQ ID NO: 46859 - DNA, 20 bp, Enterococcus casseliflavus
cgcatggaagaaagttgaaa

SEQ ID NO: 46860 - DNA, 20 bp, Bacillus fusiformis
gaaggagcttgctccttcga

SEQ ID NO: 46861 - DNA, 20 bp, Cellulosimicrobium cellulans
gcacgagaagccaccagaga

SEQ ID NO: 46862 - DNA, 20 bp, Citrobacter sedlakii
acatccacggaagactgcag

SEQ ID NO: 46863 - DNA, 20 bp, Pasteurella multocida
ggctatatgcttggtgcccg

SEQ ID NO: 46864 - DNA, 20 bp, Streptococcus equi
ccatgttaaccatttaaaag

SEQ ID NO: 46865 - DNA, 20 bp, Mannheimia haemolytica
agggtgggaccatttggcca

SEQ ID NO: 46866 - DNA, 20 bp, Clostridium ramosum
tggatggtgcagagggaagc

SEQ ID NO: 46867 - DNA, 20 bp, Bacillus fusiformis
taactggctgtaccttgacg

SEQ ID NO: 46868 - DNA, 20 bp, Brevibacillus reuszeri
gcttcggctatcactgggag

SEQ ID NO: 46869 - DNA, 20 bp, Aerococcus christensenii
ttagaaagatggctctgcta

SEQ ID NO: 46870 - DNA, 20 bp, Helcococcus ovis
atttaagtctgaatttaaag

SEQ ID NO: 46871 - DNA, 20 bp, Leuconostoc argentinum
tctagttcgacggtaccata

SEQ ID NO: 46872 - DNA, 20 bp, Neisseria sicca
ttgcttggtagcgaagctaa

SEQ ID NO: 46873 - DNA, 20 bp, Clostridium glycolicum
tgcctcatacacatggataa

SEQ ID NO: 46874 - DNA, 20 bp, Oligella urethralis
cttttcttcgttgagaaaag

SEQ ID NO: 46875 - DNA, 20 bp, Myroides odoratus
gttcggttttcggactgagt

SEQ ID NO: 46876 - DNA, 20 bp, Actinomyces bovis
ggccttcgggttgtaaagct

SEQ ID NO: 46877 - DNA, 20 bp, Myroides odoratus
taagatgggcatgcgtatca

SEQ ID NO: 46878 - DNA, 20 bp, Bacillus lentus
agataatctatccggtatta

SEQ ID NO: 46879 - DNA, 20 bp, Clostridium cadaveris
gccagcggcctaaggtaggg

SEQ ID NO: 46880 - DNA, 20 bp, Actinomyces neuii
gtgtttttggtgagagtggc

SEQ ID NO: 46881 - DNA, 20 bp, Clostridium tetani
tactaggtgtaggagggtcc

SEQ ID NO: 46882 - DNA, 20 bp, Prevotella corporis
ccgcagttgccatcgggtca

SEQ ID NO: 46883 - DNA, 20 bp, Cardiobacterium hominis
cctagagacaggtgttgcat

SEQ ID NO: 46884 - DNA, 20 bp, Bacteroides stercoris
gacgtgatgctaatcccaaa

SEQ ID NO: 46885 - DNA, 20 bp, Corynebacterium auris
cgctaggtgtgagcctcttc

SEQ ID NO: 46886 - DNA, 20 bp, Abiotrophia defectiva
atagagtttttcttcggaac

SEQ ID NO: 46887 - DNA, 20 bp, Prevotella melaninogenica
aatggacgtcgaccggcgca

SEQ ID NO: 46888 - DNA, 20 bp, Clostridium ramosum
ttatggcgcattagctggtt

SEQ ID NO: 46889 - DNA, 20 bp, Brevibacterium epidermidis
ttctctttggagctggtgta

SEQ ID NO: 46890 - DNA, 20 bp, Campylobacter sputorum
tcctttgacccttctagaga

SEQ ID NO: 46891 - DNA, 20 bp, Clostridium septicum
tgcagcttcgcatggagcag

SEQ ID NO: 46892 - DNA, 20 bp, Prevotella denticola
gacactacatctctgcagca

SEQ ID NO: 46893 - DNA, 20 bp, Sporosarcina ureae
gaatgttgaaagacggtttc

SEQ ID NO: 46894 - DNA, 20 bp, Corynebacterium auris
tgtgagcctcttccacgggg

SEQ ID NO: 46895 - DNA, 20 bp, Bacteroides forsythus
gccaatctccaaaccctgtc

SEQ ID NO: 46896 - DNA, 20 bp, Paenibacillus apiarius
tgccagggaagaacgccagg

SEQ ID NO: 46897 - DNA, 20 bp, Pseudomonas luteola
aagggttgtaacctaatacg

SEQ ID NO: 46898 - DNA, 20 bp, Aerococcus viridans
agaagattgaaagacggctc

SEQ ID NO: 46899 - DNA, 20 bp, Yersinia ruckeri
tagcactgaacattgacgtt

SEQ ID NO: 46900 - DNA, 20 bp, Staphylococcus capitis
ctcccttgtggtttgtatac

SEQ ID NO: 46901 - DNA, 20 bp, Nocardia asteroides
gccttgacatactaagaact

SEQ ID NO: 46902 - DNA, 20 bp, Paenibacillus thiaminolyticus
gttccataggtgacggtacc

SEQ ID NO: 46903 - DNA, 20 bp, Acinetobacter johnsonii
gctacctaacctagcggcgg

SEQ ID NO: 46904 - DNA, 20 bp, Aerococcus viridans
cttatagatgaccttgcggt

SEQ ID NO: 46905 - DNA, 20 bp, Weissella paramesenteroides
gcttgctctgatttgatttt

SEQ ID NO: 46906 - DNA, 20 bp, Tetragenococcus halophilus
agcaagccaagccgcaaggc

SEQ ID NO: 46907 - DNA, 20 bp, Pediococcus inopinatus
cggacgcactttcgttgaat

SEQ ID NO: 46908 - DNA, 20 bp, Moraxella bovis
caagtcgaacgatgactatc

SEQ ID NO: 46909 - DNA, 20 bp, Gemella bergeri
acaacacagatacaggtggt

SEQ ID NO: 46910 - DNA, 20 bp, Clostridium paraputrificum
tgtgggaagtcccttcgggg

SEQ ID NO: 46911 - DNA, 20 bp, Clostridium limosum
caagactgcctgggtaacca

SEQ ID NO: 46912 - DNA, 20 bp, Paenibacillus larvae
gcggaaacgtgagctaatac

SEQ ID NO: 46913 - DNA, 20 bp, Clostridium sordellii
agtaagcttttggaactgta

SEQ ID NO: 46914 - DNA, 20 bp, Bacillus alcalophilus
caaccccgaggggtcattgg

SEQ ID NO: 46915 - DNA, 20 bp, Pseudomonas citronellolis
ccataactgcctgactagag

SEQ ID NO: 46916 - DNA, 20 bp, Prevotella intermedia
ggggaaacggcattatgtgc

SEQ ID NO: 46917 - DNA, 20 bp, Dolosigranulum pigrum
gcagtgatacgtagccgact

SEQ ID NO: 46918 - DNA, 20 bp, Streptococcus parauberis
catgacaattaagtactcat

SEQ ID NO: 46919 - DNA, 20 bp, Neisseria flavescens
tcgacagctgatgacggtac

SEQ ID NO: 46920 - DNA, 20 bp, Pediococcus inopinatus
ttcgggagctagccgtctaa

SEQ ID NO: 46921 - DNA, 20 bp, Oligella ureolytica
taagatgctgacggtagttg

SEQ ID NO: 46922 - DNA, 20 bp, Weeksella virosa
agcgtttaaagacggggact

SEQ ID NO: 46923 - DNA, 20 bp, Brevibacillus centrosporus
cgtaagactgggataacata

SEQ ID NO: 46924 - DNA, 20 bp, Campylobacter rectus
ttacataagttaagtcggga

SEQ ID NO: 46925 - DNA, 20 bp, Bacteroides capilosus
tgtcctgggccacacacgta

SEQ ID NO: 46926 - DNA, 20 bp, Streptococcus alactolyticus
gtttttcttcggaacactgg

SEQ ID NO: 46927 - DNA, 20 bp, Aerococcus christensenii
acagagaaagtgcttgcact

SEQ ID NO: 46928 - DNA, 20 bp, Moraxella osloensis
ggaactgcatgtgatactgg

SEQ ID NO: 46929 - DNA, 20 bp, Pasteurella multocida
atagatagcatcattgacgt

SEQ ID NO: 46930 - DNA, 20 bp, Fusobacterium varium
agttaacagagatgttttcg

SEQ ID NO: 46931 - DNA, 20 bp, Clostridium paraputrificum
gattgtagcttcgcatgaag

SEQ ID NO: 46932 - DNA, 20 bp, Actinomyces neuii
ctgtggcctaacctttttgg

SEQ ID NO: 46933 - DNA, 20 bp, Streptococcus suis
aagtttctcacttgacggta

SEQ ID NO: 46934 - DNA, 20 bp, Serratia proteamaculans
gggtagtgtgttaatagcac

SEQ ID NO: 46935 - DNA, 20 bp, Helcococcus kunzii
tggcaatacccgaagtcgtc

SEQ ID NO: 46936 - DNA, 20 bp, Propionibacterium propionicus
gccagcaagttatgttgggg

SEQ ID NO: 46937 - DNA, 20 bp, Staphylococcus pulvereri
tttattaggagctagccgtc

SEQ ID NO: 46938 - DNA, 20 bp, Atopobium parvulum
tctgttaggtcgggagttaa

SEQ ID NO: 46939 - DNA, 20 bp, Acinetobacter junii
tgaggtgcttgcaccttatc

SEQ ID NO: 46940 - DNA, 20 bp, Streptococcus thermophilus
acaatggatgacacatgtca

SEQ ID NO: 46941 - DNA, 20 bp, Bacteroides thetaiotaomicron
ggctgtcttgagtacagtag

SEQ ID NO: 46942 - DNA, 20 bp, Comamonas testosteroni
ctagagcggctgatggcaga

SEQ ID NO: 46943 - DNA, 20 bp, Prevotella disiens
gaaggcagcttacgggagtg

SEQ ID NO: 46944 - DNA, 20 bp, Prevotella intermedia
caacgtatgcggaattcatg

SEQ ID NO: 46945 - DNA, 20 bp, Streptococcus urinalis
aaaggagcaactgcttcact

SEQ ID NO: 46946 - DNA, 20 bp, Actinomyces odontolyticus
ttagttggtcgtgtgcaggt

SEQ ID NO: 46947 - DNA, 20 bp, Arcanobacterium bernardiae
agtgtggtaggggtaattgg

SEQ ID NO: 46948 - DNA, 20 bp, Bacteroides thetaiotaomicron
cccgatggtataatcagacc

SEQ ID NO: 46949 - DNA, 20 bp, Haemophilus segnis
aaggccgcatgccataggat

SEQ ID NO: 46950 - DNA, 20 bp, Peptostreptococcus anaerobius
ggaaacacccgaagccgatt

SEQ ID NO: 46951 - DNA, 20 bp, Lactococcus garvieae
agggcgcttcctaaggtaag

SEQ ID NO: 46952 - DNA, 20 bp, Corynebacterium amycolatum
tccagcttgctggggtacac

SEQ ID NO: 46953 - DNA, 20 bp, Aerococcus viridans
gaagaagattgaaagacggc

SEQ ID NO: 46954 - DNA, 20 bp, Moraxella osloensis
ctagaatatgtgagagggaa

SEQ ID NO: 46955 - DNA, 20 bp, Tetragenococcus halophilus
ctttttccatgacggtagct

SEQ ID NO: 46956 - DNA, 20 bp, Streptococcus canis
atgttaagaacttaaaaggg

SEQ ID NO: 46957 - DNA, 20 bp, Weeksella virosa
gtctatattgacgctgatgg

SEQ ID NO: 46958 - DNA, 20 bp, Clostridium ramosum
cctgaagcttaacttcagta

SEQ ID NO: 46959 - DNA, 20 bp, Weeksella virosa
aattgagagcggcgtacggg

SEQ ID NO: 46960 - DNA, 20 bp, Dermabacter hominis
aagccgatggcccaagcttt

SEQ ID NO: 46961 - DNA, 20 bp, Eikenella corrodens
taataccactttttgctgac

SEQ ID NO: 46962 - DNA, 20 bp, Porphyromonas endodontalis
agagtctaagcgaaagcgat

SEQ ID NO: 46963 - DNA, 20 bp, Paenibacillus apiarius
ctagggctcaaccttgggtc

SEQ ID NO: 46964 - DNA, 20 bp, Paenibacillus thiaminolyticus
gagcaatctgccacttatgg

SEQ ID NO: 46965 - DNA, 20 bp, Propionibacterium propionicus
aaacgtctagagataggcgc

SEQ ID NO: 46966 - DNA, 20 bp, Cardiobacterium hominis
ggagcttgctccaggcgtcg

SEQ ID NO: 46967 - DNA, 20 bp, Weeksella virosa
taacgatagaactgccattg

SEQ ID NO: 46968 - DNA, 20 bp, Facklamia ignava
tccgcccctcagtgctggcg

SEQ ID NO: 46969 - DNA, 20 bp, Moraxella atlantae
gaactgtaaggagactgcca

SEQ ID NO: 46970 - DNA, 20 bp, Prevotella disiens
acttgagtacacacaacgta

SEQ ID NO: 46971 - DNA, 20 bp, Eikenella corrodens
aaagggaagtgctaatacca

SEQ ID NO: 46972 - DNA, 20 bp, Bacteroides thetaiotaomicron
cagcatttcagtttgcttgc

SEQ ID NO: 46973 - DNA, 20 bp, Clostridium limosum
ccttatgtccagggctacac

SEQ ID NO: 46974 - DNA, 20 bp, Gemella haemolysans
gtagagacggtacctaacca

SEQ ID NO: 46975 - DNA, 20 bp, Anaerobiospirillum succiniciproducens
tgaaagaacaccagaggcga

SEQ ID NO: 46976 - DNA, 20 bp, Corynebacterium group F
gatattgttgtggaaagctt

SEQ ID NO: 46977 - DNA, 20 bp, Brevibacillus reuszeri
aaaagaaaagatggcttcgg

SEQ ID NO: 46978 - DNA, 20 bp, Streptococcus anginosus
taccgcataacagtatgtaa

SEQ ID NO: 46979 - DNA, 20 bp, Alcaligenes faecalis
tacgaggtactgctgacggt

SEQ ID NO: 46980 - DNA, 20 bp, Streptococcus salivarius
atgctccactacaagatgga

SEQ ID NO: 46981 - DNA, 20 bp, Campylobacter rectus
agagatcaagaagaataccc

SEQ ID NO: 46982 - DNA, 20 bp, Peptoniphilus indolicus
ccttcggggacagtattaca

SEQ ID NO: 46983 - DNA, 20 bp, Paenibacillus apiarius
gctcaaccttgggtcgcatc

SEQ ID NO: 46984 - DNA, 20 bp, Burkholderia gladioli
tccggaaagaaatcctgagg

SEQ ID NO: 46985 - DNA, 20 bp, Finegoldia magna
taacggtcaaagatttatcg

SEQ ID NO: 46986 - DNA, 20 bp, Cardiobacterium hominis
ctttgggtgggaactgtaag

SEQ ID NO: 46987 - DNA, 20 bp, Leptotrichia buccalis
ttgcacctgaagccgccggt

SEQ ID NO: 46988 - DNA, 20 bp, Bacillus sp
tctgacggccctagagatag

SEQ ID NO: 46989 - DNA, 20 bp, Anaerococcus prevotii
tcagttaagtctggcaacga

SEQ ID NO: 46990 - DNA, 20 bp, Haemophilus segnis
aggaaggcatttagtttaat

SEQ ID NO: 46991 - DNA, 20 bp, Acinetobacter junii
gtgcttgcaccttatcttag

SEQ ID NO: 46992 - DNA, 20 bp, Comamonas testosteroni
gacatggcaggaacttacca

SEQ ID NO: 46993 - DNA, 20 bp, Corynebacterium jeikeium
ttgcaaggggtactcgagtg

SEQ ID NO: 46994 - DNA, 20 bp, Bacteroides stercoris
agctacacggcgacgtggtg

SEQ ID NO: 46995 - DNA, 20 bp, Bacteroides thetaiotaomicron
ggtataatcagaccgcatgg

SEQ ID NO: 46996 - DNA, 20 bp, Campylobacter lari
tactctatactcctgcttaa

SEQ ID NO: 46997 - DNA, 20 bp, Bacteroides fragilis
cagaaggcagctagcgggtg

SEQ ID NO: 46998 - DNA, 20 bp, Paenibacillus validus
gagggtgacggtacttgaga

SEQ ID NO: 46999 - DNA, 20 bp, Clostridium innocuum
cgtgaacatggatggacctg

SEQ ID NO: 47000 - DNA, 20 bp, Tetragenococcus halophilus
tttccatgacggtagctgac

SEQ ID NO: 47001 - DNA, 20 bp, Morganella morganii
gcctcgcgccatcagatgaa

SEQ ID NO: 47002 - DNA, 20 bp, Clostridium septicum
tcaactccttccgtgccgcc

SEQ ID NO: 47003 - DNA, 20 bp, Capnocytophaga ochracea
gcttttgtaagggaagaata

SEQ ID NO: 47004 - DNA, 20 bp, Streptococcus sobrinus
gaacgtgtgtaagagtggaa

SEQ ID NO: 47005 - DNA, 20 bp, Bacillus schlegellii
gcgaaggcagcgcactggcc

SEQ ID NO: 47006 - DNA, 20 bp, Clostridium clostridiiforme
aagtgaaaacccagggctca

SEQ ID NO: 47007 - DNA, 20 bp, Streptococcus gordonii
gaacgcacagtttataccgt

SEQ ID NO: 47008 - DNA, 20 bp, Alicyclobacillus acidocaldarius
cggctggctcccctaagggg

SEQ ID NO: 47009 - DNA, 20 bp, Kingella kingae
tgtgccttcgggagccgtag

SEQ ID NO: 47010 - DNA, 20 bp, Neisseria meningitidis
ctctctcaagacgtatgcgg

SEQ ID NO: 47011 - DNA, 20 bp, Bacteroides merdae
aacaggggtcccgcatggga

SEQ ID NO: 47012 - DNA, 20 bp, Helcococcus ovis
agatatcgcatgataattaa

SEQ ID NO: 47013 - DNA, 20 bp, Streptococcus hyointestinalis
aggcggtttcataagtctga

SEQ ID NO: 47014 - DNA, 20 bp, Leuconostoc gelidum
aaccttcgggagggagccga

SEQ ID NO: 47015 - DNA, 20 bp, Weeksella virosa
ctggatgcgaatctctaaag

SEQ ID NO: 47016 - DNA, 20 bp, Methylobacterium mesophilicum
cagctgttggggtgcttgca

SEQ ID NO: 47017 - DNA, 20 bp, Burkholderia multivorans
aatccctggctctaatacag

SEQ ID NO: 47018 - DNA, 20 bp, Dietzia maris
agcatgcatgtgttgtggtg

SEQ ID NO: 47019 - DNA, 20 bp, Haemophilus influenzae
accttttggagggcgtttac

SEQ ID NO: 47020 - DNA, 20 bp, Tissierella praeacuta
aaccatttggaggcagctgt

SEQ ID NO: 47021 - DNA, 20 bp, Clostridium clostridiiforme
cataagcgcacagggccgca

SEQ ID NO: 47022 - DNA, 20 bp, Acinetobacter johnsonii
aaaggtagcttgctacctaa

SEQ ID NO: 47023 - DNA, 20 bp, Methylobacterium extorquens
tcgggtgtcagtggcagacg

SEQ ID NO: 47024 - DNA, 20 bp, Vibrio hollisae
cacgctattcgagcggccga

SEQ ID NO: 47025 - DNA, 20 bp, Gemella morbillorum
tttctggtgcttgcactaga

SEQ ID NO: 47026 - DNA, 20 bp, Fusobacterium mortiferum
aattagcagagatgcttttg

SEQ ID NO: 47027 - DNA, 20 bp, Haemophilus paraphrophilus
gcaacaaattgacgttaatc

SEQ ID NO: 47028 - DNA, 20 bp, Streptococcus pyogenes
cgctgagaactggtgcttgc

SEQ ID NO: 47029 - DNA, 20 bp, Suttonella indologenes
cttctggggcaatactgacg

SEQ ID NO: 47030 - DNA, 20 bp, Prevotella denticola
atttgcaggtaccatacgaa

SEQ ID NO: 47031 - DNA, 20 bp, Pediococcus pentosaceus
tcttttaaaagatggctctg

SEQ ID NO: 47032 - DNA, 20 bp, Weissella paramesenteroides
ctgaggaatggctttggaaa

SEQ ID NO: 47033 - DNA, 20 bp, Neisseria meningitidis
tgagagagaaagcaggggac

SEQ ID NO: 47034 - DNA, 20 bp, Brevibacillus choshinensis
tgaagagcttgctcttcggc

SEQ ID NO: 47035 - DNA, 20 bp, Granulicatella elegans
accggtgcttgcactggtca

SEQ ID NO: 47036 - DNA, 20 bp, Leuconostoc argentinum
tatcgcatgatacaaagttg

SEQ ID NO: 47037 - DNA, 20 bp, Campylobacter sputorum
aacaacacttagaaatgagt

SEQ ID NO: 47038 - DNA, 20 bp, Gemella morbillorum
aaagttggttatgctaacac

SEQ ID NO: 47039 - DNA, 20 bp, Corynebacterium glucuronolyticum
agagatagttcgtcccttgt

SEQ ID NO: 47040 - DNA, 20 bp, Porphyromonas endodontalis
tgaggactctatcgagacag

SEQ ID NO: 47041 - DNA, 20 bp, Fusobacterium varium
ataccggatattatgactga

SEQ ID NO: 47042 - DNA, 20 bp, Clostridium tetani
accctgaattactcgtaact

SEQ ID NO: 47043 - DNA, 20 bp, Enterococcus raffinosus
gtgcgtaagtaactgtgcgc

SEQ ID NO: 47044 - DNA, 20 bp, Bacteroides fragilis
tgtcagtcttgagtacagta

SEQ ID NO: 47045 - DNA, 20 bp, Bacteroides capilosus
catccgactaacgaagcaga

SEQ ID NO: 47046 - DNA, 20 bp, Actinomyces meyeri
actggatattcactggtctt

SEQ ID NO: 47047 - DNA, 20 bp, Staphylococcus carnosus
catggttctgcaatgaaaga

SEQ ID NO: 47048 - DNA, 20 bp, Enterococcus raffinosus
accgcatggtttctatttga

SEQ ID NO: 47049 - DNA, 20 bp, Peptostreptococcus anaerobius
ccgaaactggaagacttgag

SEQ ID NO: 47050 - DNA, 20 bp, Burkholderia gladioli
tcctgagggctaatatcctt

SEQ ID NO: 47051 - DNA, 20 bp, Citrobacter amalonaticus
agaatttggcagagatgcca

SEQ ID NO: 47052 - DNA, 20 bp, Escherichia coli
gcgatgcggttaataaccgt

SEQ ID NO: 47053 - DNA, 20 bp, Unknown Organism
  oligonucleotide from CDC group EF-4B
actttgagaaggaaagcagg

SEQ ID NO: 47054 - DNA, 20 bp, Streptococcus equi
agttacttcggtacattgga

SEQ ID NO: 47055 - DNA, 20 bp, Bacteroides fragilis
agtgagcaatcaccgctgtg

SEQ ID NO: 47056 - DNA, 20 bp, Facklamia hominis
aacgaccgctagagtaactg

SEQ ID NO: 47057 - DNA, 20 bp, Pediococcus inopinatus
ctataaagtgagtggcgaac

SEQ ID NO: 47058 - DNA, 20 bp, Bacteroides merdae
gtggctcaaccataaaattg

SEQ ID NO: 47059 - DNA, 20 bp, Fusobacterium mortiferum
tttcgcatgaaattcatatg

SEQ ID NO: 47060 - DNA, 20 bp, Leuconostoc lactis
ggagaagaatgtatctgata

SEQ ID NO: 47061 - DNA, 20 bp, Streptococcus agalactiae
ctagactgatgagttgcgaa

SEQ ID NO: 47062 - DNA, 20 bp, Lactococcus garvieae
cctaaggtaagaccgatgac

SEQ ID NO: 47063 - DNA, 20 bp, Oligella urethralis
tcgccatcaagagagcaagc

SEQ ID NO: 47064 - DNA, 20 bp, Bacillus flexus
aagtcgagcgaactgattag

SEQ ID NO: 47065 - DNA, 20 bp, Alcaligenes faecalis
agagaagaaaaggtacctcc

SEQ ID NO: 47066 - DNA, 20 bp, Streptococcus sobrinus
catgcaagtggaacgcattg

SEQ ID NO: 47067 - DNA, 20 bp, Anaerococcus tetradius
aactcaaaaagcctgtccca

SEQ ID NO: 47068 - DNA, 20 bp, Prevotella corporis
ctgggcggccaagcgaaagc

SEQ ID NO: 47069 - DNA, 20 bp, Facklamia languida
ctaccatggcaatgatgcat

SEQ ID NO: 47070 - DNA, 20 bp, Brevibacillus choshinensis
ggaaagacctttggtcacgt

SEQ ID NO: 47071 - DNA, 20 bp, Bacillus oleronius
taccggataacttttttctt

SEQ ID NO: 47072 - DNA, 20 bp, Aeromonas hydrophila
tgatgcctaatacgtatcaa

SEQ ID NO: 47073 - DNA, 20 bp, Moraxella atlantae
atagagggggatagctcggg

SEQ ID NO: 47074 - DNA, 20 bp, Prevotella melaninogenica
gctgttggtacctggtatca

SEQ ID NO: 47075 - DNA, 20 bp, Moraxella osloensis
gcagggaggagaggctaatg

SEQ ID NO: 47076 - DNA, 20 bp, Bacillus oleronius
ataccggataacttttttct

SEQ ID NO: 47077 - DNA, 20 bp, Anaerobiospirillum succiniciproducens
cgtacagagggaaacgatac

SEQ ID NO: 47078 - DNA, 20 bp, Bacillus marinus
ctctagaggggtcagaggat

SEQ ID NO: 47079 - DNA, 20 bp, Bordetella bronchiseptica
gaaagaaacggcacgggcta

SEQ ID NO: 47080 - DNA, 20 bp, Streptococcus agalactiae
cacatgttagttatttaaaa

SEQ ID NO: 47081 - DNA, 20 bp, Clostridium cadaveris
atacccaaagtccgtgaggt

SEQ ID NO: 47082 - DNA, 20 bp, Streptococcus pyogenes
cgcatgttagtaatttaaaa

SEQ ID NO: 47083 - DNA, 20 bp, Corynebacterium jeikeium
gcaaggggtactcgagtggc

SEQ ID NO: 47084 - DNA, 20 bp, Clostridium ramosum
acataagtaacctgccctag

SEQ ID NO: 47085 - DNA, 20 bp, Bacillus schlegellii
ggctaataccggatagattg

SEQ ID NO: 47086 - DNA, 20 bp, Enterococcus raffinosus
atggttctacagtgaaagat

SEQ ID NO: 47087 - DNA, 20 bp, Actinomyces naeslundii
aatacgggatattctgggtc

SEQ ID NO: 47088 - DNA, 20 bp, Acinetobacter genospecies 3
aggtagcttgctactgatct

SEQ ID NO: 47089 - DNA, 20 bp, Bacillus oleronius
tgagggagaattgaaagatg

SEQ ID NO: 47090 - DNA, 20 bp, Propionibacterium acnes
agagatgggtgtgcctcttt

SEQ ID NO: 47091 - DNA, 20 bp, Clostridium innocuum
catggatggacctgcgacgc

SEQ ID NO: 47092 - DNA, 20 bp, Empedobacter brevis
gcttcagtggctaagcgaaa

SEQ ID NO: 47093 - DNA, 20 bp, Turicella otitidis
gggtcttttcacgactttcg

SEQ ID NO: 47094 - DNA, 20 bp, Corynebacterium amycolatum
ttcaccatcgacgaagggtt

SEQ ID NO: 47095 - DNA, 20 bp, Fusobacterium nucleatum
atgattttagggcatcctag

SEQ ID NO: 47096 - DNA, 20 bp, Bacillus alcalophilus
gtctgatgtgaaatatcggg

SEQ ID NO: 47097 - DNA, 20 bp, Bacteroides uniformis
gccgcaaggcagttgtgaag

SEQ ID NO: 47098 - DNA, 20 bp, Dermacoccus nishinomiyaensis
taatactggatacgaccgat

SEQ ID NO: 47099 - DNA, 20 bp, Anaerococcus prevotii
agtaacctgccttagacatt

SEQ ID NO: 47100 - DNA, 20 bp, Moraxella osloensis
tttaagcagggaggagaggc

SEQ ID NO: 47101 - DNA, 20 bp, Bacillus pallidus
tgcagactgggataacttcg

SEQ ID NO: 47102 - DNA, 20 bp, Helcococcus kunzii
gctaagaagcaagccctggc

SEQ ID NO: 47103 - DNA, 20 bp, Collinsella aerofaciens
gtggggggacgatccccccg

SEQ ID NO: 47104 - DNA, 20 bp, Prevotella bivia
acggaaggttcgggcgttat

SEQ ID NO: 47105 - DNA, 20 bp, Chromobacterium violaceum
aatccttggtagcgtagcta

SEQ ID NO: 47106 - DNA, 20 bp, Helcococcus kunzii
acttgagtagatgaggggaa

SEQ ID NO: 47107 - DNA, 20 bp, Geobacillus thermoglucosidasius
agcggaccgggcgggagctt

SEQ ID NO: 47108 - DNA, 20 bp, Propionibacterium freudenreichii
tatgagcctggcctgcatgg

SEQ ID NO: 47109 - DNA, 20 bp, Helcococcus ovis
ggcggtaatttaagtctgaa

SEQ ID NO: 47110 - DNA, 20 bp, Leuconostoc lactis
tagtaactgatcaggtagtg

SEQ ID NO: 47111 - DNA, 20 bp, Fusobacterium mortiferum
atgtgagtttcgcatgaaat

SEQ ID NO: 47112 - DNA, 20 bp, Streptococcus iniae
tagaacgctgaggattggtg

SEQ ID NO: 47113 - DNA, 20 bp, Bacillus simplex
agatggaaagacggtttacg

SEQ ID NO: 47114 - DNA, 20 bp, Citrobacter sedlakii
tccacggaagactgcagaga

SEQ ID NO: 47115 - DNA, 20 bp, Anaerobiospirillum succiniciproducens
agggaaacgataccgggagg

SEQ ID NO: 47116 - DNA, 20 bp, Weissella paramesenteroides
acgagcttgctctgatttga

SEQ ID NO: 47117 - DNA, 20 bp, Paenibacillus popilliae
caagtcgagcggggttagtt

SEQ ID NO: 47118 - DNA, 20 bp, Veillonella atypica
ctggatgaaaggtggcctct

SEQ ID NO: 47119 - DNA, 20 bp, Veillonella dispar
atcgggacgaaaggccttct

SEQ ID NO: 47120 - DNA, 20 bp, Rhodococcus equi
acgttttcccttgtggtttg

SEQ ID NO: 47121 - DNA, 20 bp, Facklamia ignava
ggagcgcaggcggttgatta

SEQ ID NO: 47122 - DNA, 20 bp, Weeksella virosa
tggcatcatttagttttgaa

SEQ ID NO: 47123 - DNA, 20 bp, Corynebacterium confusum
ccggataggaccgcactttg

SEQ ID NO: 47124 - DNA, 20 bp, Gemella sanguinis
atacagtagagacggtacct

SEQ ID NO: 47125 - DNA, 20 bp, Peptoniphilus indolicus
acctgcctttgacacgggga

SEQ ID NO: 47126 - DNA, 20 bp, Dermacoccus nishinomiyaensis
tcgatagtgaaagatggctc

SEQ ID NO: 47127 - DNA, 20 bp, Chromobacterium violaceum
tatacgagcagccgacgtct

SEQ ID NO: 47128 - DNA, 20 bp, Streptococcus pyogenes
agtagaacgctgagaactgg

SEQ ID NO: 47129 - DNA, 20 bp, Propionibacterium freudenreichii
cagttcggctggggactcat

SEQ ID NO: 47130 - DNA, 20 bp, Citrobacter farmeri
aaccttagccattgacgtta

SEQ ID NO: 47131 - DNA, 20 bp, Facklamia sourekii
cctacgggacaaggagacag

SEQ ID NO: 47132 - DNA, 20 bp, Streptococcus dysgalactiae
ccaccatgtgacggtaacta

SEQ ID NO: 47133 - DNA, 20 bp, Corynebacterium glucuronolyticum
attgggctagagatagttcg

SEQ ID NO: 47134 - DNA, 20 bp, Leuconostoc argentinum
ctagagatgggtccgcggtg

SEQ ID NO: 47135 - DNA, 20 bp, Anaerococcus tetradius
acgacgaataataccctatg

SEQ ID NO: 47136 - DNA, 20 bp, Facklamia ignava
gaaacctacccttcagcggg

SEQ ID NO: 47137 - DNA, 20 bp, Corynebacterium hoagii
gatatgagctcctgtcgcat

SEQ ID NO: 47138 - DNA, 20 bp, Weissella paramesenteroides
ttgttggttgaaagatggtt

SEQ ID NO: 47139 - DNA, 20 bp, Haemophilus influenzae
atgtgttaatagcacatcaa

SEQ ID NO: 47140 - DNA, 20 bp, Facklamia sourekii
aggtcattggaaactggcaa

SEQ ID NO: 47141 - DNA, 20 bp, Haemophilus actinomycetomicans
ggagacgaaagtgcgggacc

SEQ ID NO: 47142 - DNA, 20 bp, Helcococcus ovis
tgtcgggagtcaaatctcgg

SEQ ID NO: 47143 - DNA, 20 bp, Alicyclobacillus acidocaldarius
aacgcgctggtaacacaggt

SEQ ID NO: 47144 - DNA, 20 bp, Prevotella denticola
acagagggacggtgtaatgc

SEQ ID NO: 47145 - DNA, 20 bp, Oligella ureolytica
aaccacttttctcaacgaag

SEQ ID NO: 47146 - DNA, 20 bp, Paenibacillus alvei
taccaggtcttgacatctga

SEQ ID NO: 47147 - DNA, 20 bp, Gemella bergeri
gtaactatacacaaaacaga

SEQ ID NO: 47148 - DNA, 20 bp, Unknown Organism
  oligonucleotide from CDC group EF-4B
tgagaaggaaagcaggggct

SEQ ID NO: 47149 - DNA, 20 bp, Corynebacterium jeikeium
tttatttacgattcccgtgc

SEQ ID NO: 47150 - DNA, 20 bp, Campylobacter lari
cctaagaaccttatagagat

SEQ ID NO: 47151 - DNA, 20 bp, Neisseria subflava
aagaaaaggatagggttaat

SEQ ID NO: 47152 - DNA, 20 bp, Eggerthella lenta
agcgcgtaggcggcctctca

SEQ ID NO: 47153 - DNA, 20 bp, Acinetobacter johnsonii
aaaggtagcttgctacctga

SEQ ID NO: 47154 - DNA, 20 bp, Moraxella osloensis
gggaggagaggctaatggtt

SEQ ID NO: 47155 - DNA, 20 bp, Acinetobacter calcoaceticus
ttcagatagtggacgttact

SEQ ID NO: 47156 - DNA, 20 bp, Helcococcus kunzii
cgcagctacctcgtgagagc

SEQ ID NO: 47157 - DNA, 20 bp, Propionibacterium acnes
gagagtggcgagcctgtgag

SEQ ID NO: 47158 - DNA, 20 bp, Campylobacter concisus
gtggcctgtcaaagggagct

SEQ ID NO: 47159 - DNA, 20 bp, Clostridium septicum
gagcgaggggagtttcttcg

SEQ ID NO: 47160 - DNA, 20 bp, Salmonella paratyphi
aaaagaagtaggtagctaac

SEQ ID NO: 47161 - DNA, 20 bp, Bacteroides ureolyticus
actgatagtctagagtaggg

SEQ ID NO: 47162 - DNA, 20 bp, Campylobacter sputorum
aatgagtgctaatacctcat

SEQ ID NO: 47163 - DNA, 20 bp, Mannheimia haemolytica
taatagaacagtcgattgac

SEQ ID NO: 47164 - DNA, 20 bp, Comamonas testosteroni
tgacatggcaggaacttacc

SEQ ID NO: 47165 - DNA, 20 bp, Actinomyces turicensis
tcttctttgggataacggtc

SEQ ID NO: 47166 - DNA, 20 bp, Streptococcus thermophilus
aaagttacttcggtacatcg

SEQ ID NO: 47167 - DNA, 20 bp, Alcaligenes faecalis
aatacgaggtactgctgacg

SEQ ID NO: 47168 - DNA, 20 bp, Gemella haemolysans
cctttggttagacacagata

SEQ ID NO: 47169 - DNA, 20 bp, Moraxella  catarrhalis
gaacgaagttaggaagcttg

SEQ ID NO: 47170 - DNA, 20 bp, Escherichia hermannii
gaaggcgatgcggttaataa

SEQ ID NO: 47171 - DNA, 20 bp, Bacteroides ureolyticus
cgtaaactccttttatcagg

SEQ ID NO: 47172 - DNA, 20 bp, Corynebacterium amycolatum
accatcgacgaagggtttct

SEQ ID NO: 47173 - DNA, 20 bp, Staphylococcus pulvereri
tagtgaaagacggcttcggc

SEQ ID NO: 47174 - DNA, 20 bp, Clostridium innocuum
ccatgggagtcagtaatacc

SEQ ID NO: 47175 - DNA, 20 bp, Peptoniphilus indolicus
cataacgatcaaagtgaatt

SEQ ID NO: 47176 - DNA, 20 bp, Brevibacillus brevis
aaaagctgaaagtcggtttc

SEQ ID NO: 47177 - DNA, 20 bp, Brevibacillus choshinensis
cccgctgaccctcctagaga

SEQ ID NO: 47178 - DNA, 20 bp, Fusobacterium varium
acagagatgttttcgtgcct

SEQ ID NO: 47179 - DNA, 20 bp, Streptococcus constellatus
ctaccccgtattctgtgagt

SEQ ID NO: 47180 - DNA, 20 bp, Bacteroides ureolyticus
ttgttgctttgctagtcaag

SEQ ID NO: 47181 - DNA, 20 bp, Methylobacterium extorquens
cgagagatcggggatcctct

SEQ ID NO: 47182 - DNA, 20 bp, Neisseria polysaccharea
aggataaccgcaaggggtcc

SEQ ID NO: 47183 - DNA, 20 bp, Anaerococcus tetradius
agagatagttccttacttct

SEQ ID NO: 47184 - DNA, 20 bp, Neisseria sicca
ggagacggaagggtgccttc

SEQ ID NO: 47185 - DNA, 20 bp, Oligella ureolytica
acttgttccttgggtggcga

SEQ ID NO: 47186 - DNA, 20 bp, Leptotrichia buccalis
agcacgcatgtgcccggcaa

SEQ ID NO: 47187 - DNA, 20 bp, Bacillus coagulans
ggtcgtaaaactctgttgcc

SEQ ID NO: 47188 - DNA, 20 bp, Weissella paramesenteroides
aagagaagaacggcactgag

SEQ ID NO: 47189 - DNA, 20 bp, Bacteroides merdae
tggctcaaccataaaattgc

SEQ ID NO: 47190 - DNA, 20 bp, Paenibacillus validus
cgcctcggagagtaactgct

SEQ ID NO: 47191 - DNA, 20 bp, Leptotrichia buccalis
ggggtgaaaacttgcggctc

SEQ ID NO: 47192 - DNA, 20 bp, Facklamia ignava
cgagaagggaacttgttcct

SEQ ID NO: 47193 - DNA, 20 bp, Acinetobacter lwoffii
gaaaagtagcttgctacttg

SEQ ID NO: 47194 - DNA, 20 bp, Corynebacterium jeikeium
gcttgcaaggggtactcgag

SEQ ID NO: 47195 - DNA, 20 bp, Chromobacterium violaceum
gttatacgagcagccgacgt

SEQ ID NO: 47196 - DNA, 20 bp, Leuconostoc fallax
ctaataccgtataacaacac

SEQ ID NO: 47197 - DNA, 20 bp, Cardiobacterium hominis
cgatggagcttgctccaggc

SEQ ID NO: 47198 - DNA, 20 bp, Fusobacterium nucleatum
gatgtttcagtgtcccttcg

SEQ ID NO: 47199 - DNA, 20 bp, Moraxella  catarrhalis
aacgaagttaggaagcttgc

SEQ ID NO: 47200 - DNA, 20 bp, Veillonella atypica
gatggacagaactagagatg

SEQ ID NO: 47201 - DNA, 20 bp, Acinetobacter genospecies 3
gagaggtagcttgctactga

SEQ ID NO: 47202 - DNA, 20 bp, Actinomyces bovis
tgacataccgcgcaaaagca

SEQ ID NO: 47203 - DNA, 20 bp, Bacillus megaterium
aggatcttctccttcatggg

SEQ ID NO: 47204 - DNA, 20 bp, Bacillus lentus
ggcaatagccatctttcctt

SEQ ID NO: 47205 - DNA, 20 bp, Paenibacillus amylolyticus
gtctggtgtttaaggccaag

SEQ ID NO: 47206 - DNA, 20 bp, Haemophilus paraphrophilus
tgtgttaatagcgcaacaaa

SEQ ID NO: 47207 - DNA, 20 bp, Eggerthella lenta
gttcggtagaggcaggcgga

SEQ ID NO: 47208 - DNA, 20 bp, Anaerobiospirillum succiniciproducens
cttttagagataagagagtg

SEQ ID NO: 47209 - DNA, 20 bp, Alicyclobacillus acidocaldarius
agagctttacaacccgaagg

SEQ ID NO: 47210 - DNA, 20 bp, Corynebacterium ulcerans
atatacaagatcggcgtaga

SEQ ID NO: 47211 - DNA, 20 bp, Actinomyces neuii
agggcatcttggttcggatc

SEQ ID NO: 47212 - DNA, 20 bp, Peptostreptococcus anaerobius
gataatatatatttacggca

SEQ ID NO: 47213 - DNA, 20 bp, Propionibacterium freudenreichii
aagctttatgcggtcaggga

SEQ ID NO: 47214 - DNA, 20 bp, Helcococcus ovis
tcggaaacttgtatacaggt

SEQ ID NO: 47215 - DNA, 20 bp, Methylobacterium mesophilicum
ttgacatggcgtgttaccca

SEQ ID NO: 47216 - DNA, 20 bp, Corynebacterium mycetoides
cgcgtgtgcgacactgtgag

SEQ ID NO: 47217 - DNA, 20 bp, Paenibacillus macerans
agctaataccggataatcaa

SEQ ID NO: 47218 - DNA, 20 bp, Weeksella virosa
gacaatgggttagcgcctga

SEQ ID NO: 47219 - DNA, 20 bp, Anaerococcus prevotii
ggtgtaaaaggcagtagctt

SEQ ID NO: 47220 - DNA, 20 bp, Porphyromonas endodontalis
caacccgcgtcgatagttac

SEQ ID NO: 47221 - DNA, 20 bp, Prevotella disiens
gatacagagatgttgaggtc

SEQ ID NO: 47222 - DNA, 20 bp, Brevibacillus laterosporus
atggcgcaagctatcactta

SEQ ID NO: 47223 - DNA, 20 bp, Eikenella corrodens
ctgaactggatagctagagt

SEQ ID NO: 47224 - DNA, 20 bp, Streptococcus constellatus
caagtagaacgcacaggatg

SEQ ID NO: 47225 - DNA, 20 bp, Acinetobacter calcoaceticus
agttaataccttcagatagt

SEQ ID NO: 47226 - DNA, 20 bp, Paenibacillus amylolyticus
gtaactgctaccggagtgac

SEQ ID NO: 47227 - DNA, 20 bp, Bacteroides forsythus
atacctcataaaacaggggt

SEQ ID NO: 47228 - DNA, 20 bp, Tetragenococcus halophilus
gaaactggatcacttgagtg

SEQ ID NO: 47229 - DNA, 20 bp, Actinomyces neuii
gcgacgtcgtgtgggggatg

SEQ ID NO: 47230 - DNA, 20 bp, Ralstonia paucula
tacctggggtagatgacggt

SEQ ID NO: 47231 - DNA, 20 bp, Streptococcus porcinus
agagataggctttctcttcg

SEQ ID NO: 47232 - DNA, 20 bp, Corynebacterium glucuronolyticum
tgggcttgacatatgtgaga

SEQ ID NO: 47233 - DNA, 20 bp, Prevotella bivia
tgaagttcgtgaccgtaagg

SEQ ID NO: 47234 - DNA, 20 bp, Gemella bergeri
gcgcgcaggtggtttagaaa

SEQ ID NO: 47235 - DNA, 20 bp, Propionibacterium freudenreichii
ggtcagggatcgtctcgcgg

SEQ ID NO: 47236 - DNA, 20 bp, Photobacterium damselae
tgtagttaacacctgcatta

SEQ ID NO: 47237 - DNA, 20 bp, Clostridium innocuum
actacaatggcgaccacaaa

SEQ ID NO: 47238 - DNA, 20 bp, Facklamia sourekii
gttaagtgttggggggcttc

SEQ ID NO: 47239 - DNA, 20 bp, Anaerococcus prevotii
gtatcggaataattcggtgc

SEQ ID NO: 47240 - DNA, 20 bp, Listeria monocytogenes
gcttttgaaagatggtttcg

SEQ ID NO: 47241 - DNA, 20 bp, Haemophilus actinemycetemcomitans
ggatgtactgacgctgatgt

SEQ ID NO: 47242 - DNA, 20 bp, Gemella morbillorum
ttatgctaacactatgagat

SEQ ID NO: 47243 - DNA, 20 bp, Clostridium clostridiiforme
ctgccgaaggcggggcaggt

SEQ ID NO: 47244 - DNA, 20 bp, Streptococcus suis
agagtggaaagtttctcact

SEQ ID NO: 47245 - DNA, 20 bp, Eggerthella lenta
ttcggtagaggcaggcggaa

SEQ ID NO: 47246 - DNA, 20 bp, Sporosarcina pasteurii
ctgaccggtatagagatata

SEQ ID NO: 47247 - DNA, 20 bp, Anaerobiospirillum succiniciproducens
ggaaacgataccgtgaggtg

SEQ ID NO: 47248 - DNA, 20 bp, Vibrio hollisae
caggatgggcccagttggga

SEQ ID NO: 47249 - DNA, 20 bp, Leptotrichia buccalis
caagcctgccctggaaactg

SEQ ID NO: 47250 - DNA, 20 bp, Gemella bergeri
aagccaatctcataaaacta

SEQ ID NO: 47251 - DNA, 20 bp, Burkholderia gladioli
tcctggagagatctgggagt

SEQ ID NO: 47252 - DNA, 20 bp, Acinetobacter calcoaceticus
ggctactgaagttaatacct

SEQ ID NO: 47253 - DNA, 20 bp, Streptococcus parasanguinis
ggtgcttgcaccgagcggaa

SEQ ID NO: 47254 - DNA, 20 bp, Ochrobactrum intermedium
gatttatcggtgatggatga

SEQ ID NO: 47255 - DNA, 20 bp, Facklamia ignava
gaagcgacgtcgcgaggcca

SEQ ID NO: 47256 - DNA, 20 bp, Leuconostoc lactis
acaccgcatggtgtagggtt

SEQ ID NO: 47257 - DNA, 20 bp, Streptococcus parasanguinis
ggtgcttgcaccgagcggag

SEQ ID NO: 47258 - DNA, 20 bp, Corynebacterium glucuronolyticum
ccaggggcttaacttttggt

SEQ ID NO: 47259 - DNA, 20 bp, Lactococcus garvieae
cttcgggacacgggatacag

SEQ ID NO: 47260 - DNA, 20 bp, Campylobacter lari
tgttgctgtgctagtcacgg

SEQ ID NO: 47261 - DNA, 20 bp, Paenibacillus amylolyticus
taactgctaccggagtgacg

SEQ ID NO: 47262 - DNA, 20 bp, Bacillus coagulans
ggacctcacgccaccggatg

SEQ ID NO: 47263 - DNA, 20 bp, Streptococcus porcinus
ccagtctaatgagttgcgaa

SEQ ID NO: 47264 - DNA, 20 bp, Aerococcus christensenii
tttcaaagttagcggcggac

SEQ ID NO: 47265 - DNA, 20 bp, Streptococcus infantarius
taaagtttgaagagttgcga

SEQ ID NO: 47266 - DNA, 20 bp, Oligella ureolytica
accttaagatgctgacggta

SEQ ID NO: 47267 - DNA, 20 bp, Pseudoramibacter alactolyticus
ttttgtcgcatggcaagatc

SEQ ID NO: 47268 - DNA, 20 bp, Moraxella osloensis
ttagacgttacctgcagaat

SEQ ID NO: 47269 - DNA, 20 bp, Prevotella melaninogenica
tactggtttccttgagtacg

SEQ ID NO: 47270 - DNA, 20 bp, Anaerobiospirillum succiniciproducens
acactgacgttacccacaga

SEQ ID NO: 47271 - DNA, 20 bp, Leptotrichia buccalis
ccagacaagtctggggtgaa

SEQ ID NO: 47272 - DNA, 20 bp, Alicyclobacillus acidocaldarius
tggactttcactccagactt

SEQ ID NO: 47273 - DNA, 20 bp, Atopobium parvulum
cggtctgttaggtcgggagt

SEQ ID NO: 47274 - DNA, 20 bp, Peptoniphilus indolicus
gaacatgaagtcggagttgc

SEQ ID NO: 47275 - DNA, 20 bp, Brevibacillus thermoruber
gcggaaaggtggcgcaagct

SEQ ID NO: 47276 - DNA, 20 bp, Haemophilus segnis
ccgcaaggccgcatgccata

SEQ ID NO: 47277 - DNA, 20 bp, Eggerthella lenta
atggggtcgcggcccattag

SEQ ID NO: 47278 - DNA, 20 bp, Lactococcus lactis
agagaagaacgttggtgaga

SEQ ID NO: 47279 - DNA, 20 bp, Bacteroides forsythus
ctaatacctcataaaacagg

SEQ ID NO: 47280 - DNA, 20 bp, Bacillus lentus
gggattcgctcatgcgtcgc

SEQ ID NO: 47281 - DNA, 20 bp, Corynebacterium group F
gtgaggggatgctaatcgca

SEQ ID NO: 47282 - DNA, 20 bp, Alicyclobacillus acidocaldarius
tctctcagcggcccaattgg

SEQ ID NO: 47283 - DNA, 20 bp, Paenibacillus macerans
caatcctatcaaagctggtc

SEQ ID NO: 47284 - DNA, 20 bp, Corynebacterium glucuronolyticum
tgcactgggggataagcttg

SEQ ID NO: 47285 - DNA, 20 bp, Brevibacterium casei
cagagagaggcgaacccgtg

SEQ ID NO: 47286 - DNA, 20 bp, Streptococcus canis
ctagtctaaggagttgcgaa

SEQ ID NO: 47287 - DNA, 20 bp, Pseudoramibacter alactolyticus
gcatggcaagatcatgaaaa

SEQ ID NO: 47288 - DNA, 20 bp, Nocardia asteroides
tcgatactggaaagctagag

SEQ ID NO: 47289 - DNA, 20 bp, Leuconostoc argentinum
ggttaacttgagtgttgtag

SEQ ID NO: 47290 - DNA, 20 bp, Peptostreptococcus anaerobius
tgttgcaggggaagataatg

SEQ ID NO: 47291 - DNA, 20 bp, Neisseria lactamica
tgactgcttggtagcgaagc

SEQ ID NO: 47292 - DNA, 20 bp, Brochothrix campestris
ctgaacatcataagatgttc

SEQ ID NO: 47293 - DNA, 20 bp, Aerococcus viridans
tgtcacttatagatgacctt

SEQ ID NO: 47294 - DNA, 20 bp, Bacteroides forsythus
taccgggcgaccggatgcca

SEQ ID NO: 47295 - DNA, 20 bp, Bacillus coagulans
ttgccggggaagaacaagtg

SEQ ID NO: 47296 - DNA, 20 bp, Empedobacter brevis
taggcggattaatcagtcag

SEQ ID NO: 47297 - DNA, 20 bp, Bacillus alcalophilus
ctgatgtgaaatatcggggc

SEQ ID NO: 47298 - DNA, 20 bp, Alicyclobacillus acidocaldarius
ggctggctcccctaaggggt

SEQ ID NO: 47299 - DNA, 20 bp, Streptococcus gordonii
ttgctacaccatagactgtg

SEQ ID NO: 47300 - DNA, 20 bp, Eikenella corrodens
cggccgataactgattagct

SEQ ID NO: 47301 - DNA, 20 bp, Prevotella bivia
ccataactaagggataaccc

SEQ ID NO: 47302 - DNA, 20 bp, Brevibacillus choshinensis
gggccacttgaaactgggaa

SEQ ID NO: 47303 - DNA, 20 bp, Fusobacterium nucleatum
cttagaattatgaaagctat

SEQ ID NO: 47304 - DNA, 20 bp, Peptostreptococcus anaerobius
tcgtagatatatcaaagtgt

SEQ ID NO: 47305 - DNA, 20 bp, Citrobacter sedlakii
ctcttgccaccggatgtgcc

SEQ ID NO: 47306 - DNA, 20 bp, Bacillus pumilus
cttgaaccgcatggttcaag

SEQ ID NO: 47307 - DNA, 20 bp, Prevotella oris
gcagcgcgaactggtccact

SEQ ID NO: 47308 - DNA, 20 bp, Granulicatella elegans
gctaaaaccgcataggttct

SEQ ID NO: 47309 - DNA, 20 bp, Bacillus fusiformis
ccgataaagtcgttctcagt

SEQ ID NO: 47310 - DNA, 20 bp, Facklamia ignava
aaccatcggaaacgatgact

SEQ ID NO: 47311 - DNA, 20 bp, Leuconostoc fallax
ctaataccgtataacaacgc

SEQ ID NO: 47312 - DNA, 20 bp, Lactococcus raffinolactis
ttgacatactcgtgctattc

SEQ ID NO: 47313 - DNA, 20 bp, Streptococcus infantarius
ttgctaaagtttgaagagtt

SEQ ID NO: 47314 - DNA, 20 bp, Comamonas terrigena
cttgtgctactagagcggcc

SEQ ID NO: 47315 - DNA, 20 bp, Kocuria varians
cgtaacaaggcagccgtacc

SEQ ID NO: 47316 - DNA, 20 bp, Dermacoccus nishinomiyaensis
acgatgaagcaccagcttgc

SEQ ID NO: 47317 - DNA, 20 bp, Clostridium clostridiiforme
agacggcgaagcaagtctga

SEQ ID NO: 47318 - DNA, 20 bp, Alicyclobacillus acidocaldarius
ttccgggcgttattccggcc

SEQ ID NO: 47319 - DNA, 20 bp, Bacillus fusiformis
tagtaactggctgtaccttg

SEQ ID NO: 47320 - DNA, 20 bp, Campylobacter lari
gctgtgctagtcacggcagt

SEQ ID NO: 47321 - DNA, 20 bp, Listeria monocytogenes
taaagtgtggcgcatgccac

SEQ ID NO: 47322 - DNA, 20 bp, Streptococcus dysgalactiae
gactggtgcttgcaccggtt

SEQ ID NO: 47323 - DNA, 20 bp, Facklamia hominis
tagagaagaacgaccgctag

SEQ ID NO: 47324 - DNA, 20 bp, Streptococcus hyovaginalis
aagcgaagaacgggagtaag

SEQ ID NO: 47325 - DNA, 20 bp, Clostridium clostridiiforme
tgccgaaggcggggcaggta

SEQ ID NO: 47326 - DNA, 20 bp, Corynebacterium accolens
ggataggaaccatctttagt

SEQ ID NO: 47327 - DNA, 20 bp, Facklamia ignava
taaccatcggaaacgatgac

SEQ ID NO: 47328 - DNA, 20 bp, Gemella haemolysans
ggagggagccggtcacggtg

SEQ ID NO: 47329 - DNA, 20 bp, Lactococcus lactis
tctgcctttgagcgggggac

SEQ ID NO: 47330 - DNA, 20 bp, Corynebacterium jeikeium
acggaaaggccctttgcttg

SEQ ID NO: 47331 - DNA, 20 bp, Bacillus lentus
aaagcaagcttcttattggt

SEQ ID NO: 47332 - DNA, 20 bp, Propionibacterium freudenreichii
gtttgacatgtactggaagc

SEQ ID NO: 47333 - DNA, 20 bp, Pediococcus pentosaceus
ccgttaattgattatgacgt

SEQ ID NO: 47334 - DNA, 20 bp, Weissella paramesenteroides
caaccgcatggttgttggtt

SEQ ID NO: 47335 - DNA, 20 bp, Propionibacterium freudenreichii
atcacgtcggaagtgaaatt

SEQ ID NO: 47336 - DNA, 20 bp, Chromobacterium violaceum
gttgggggtttgaatccttg

SEQ ID NO: 47337 - DNA, 20 bp, Brevibacillus choshinensis
accaatgaagagcttgctct

SEQ ID NO: 47338 - DNA, 20 bp, Corynebacterium glucuronolyticum
aggggcttaacttttggttg

SEQ ID NO: 47339 - DNA, 20 bp, Acinetobacter haemolyticus
gagcggggaagtgtagcttg

SEQ ID NO: 47340 - DNA, 20 bp, Streptococcus infantarius
tctaacatgggttaaatgct

SEQ ID NO: 47341 - DNA, 20 bp, Campylobacter lari
cggctgctaatactctatac

SEQ ID NO: 47342 - DNA, 20 bp, Bacteroides vulgatus
ccaatcccaaaaacctctct

SEQ ID NO: 47343 - DNA, 20 bp, Gemella haemolysans
atagactgggacaactattg

SEQ ID NO: 47344 - DNA, 20 bp, Comamonas terrigena
gtgctactagagcggccgat

SEQ ID NO: 47345 - DNA, 20 bp, Gemella bergeri
tgctaagtgttggtctcaaa

SEQ ID NO: 47346 - DNA, 20 bp, Helcococcus ovis
gtccttagtgaagataatga

SEQ ID NO: 47347 - DNA, 20 bp, Propionibacterium propionicus
gcttttgtgacggtagtggc

SEQ ID NO: 47348 - DNA, 20 bp, Lactococcus lactis
aagttttaagtttgaaagat

SEQ ID NO: 47349 - DNA, 20 bp, Bacteroides merdae
agattcatcgctgatagata

SEQ ID NO: 47350 - DNA, 20 bp, Arcanobacterium bernardiae
gcttgacatacactgcgatg

SEQ ID NO: 47351 - DNA, 20 bp, Helcococcus kunzii
caatacccgaagtcgtcgag

SEQ ID NO: 47352 - DNA, 20 bp, Gemella bergeri
ggtggtttagaaagtctgat

SEQ ID NO: 47353 - DNA, 20 bp, Aerococcus christensenii
aacacgtaaggaacctaccg

SEQ ID NO: 47354 - DNA, 20 bp, Proteus mirabilis
tgataaggttaataccctta

SEQ ID NO: 47355 - DNA, 20 bp, Aerococcus viridans
tcttccgcatggaagaagat

SEQ ID NO: 47356 - DNA, 20 bp, Corynebacterium glucuronolyticum
cctataggaccgcatcgtgg

SEQ ID NO: 47357 - DNA, 20 bp, Bacteroides capilosus
ggggaataacagtccgaaag

SEQ ID NO: 47358 - DNA, 20 bp, Gemella haemolysans
ctatgagatggctttgcggt

SEQ ID NO: 47359 - DNA, 20 bp, Proteus mirabilis
tgataaggttaatacccttg

SEQ ID NO: 47360 - DNA, 20 bp, Vibrio cholerae
cacaaagtggcaagcgtcct

SEQ ID NO: 47361 - DNA, 20 bp, Paenibacillus larvae
gaaagacggggcaacctgtc

SEQ ID NO: 47362 - DNA, 20 bp, Actinomyces turicensis
gctcatggtcaagccgcagc

SEQ ID NO: 47363 - DNA, 20 bp, Gemella morbillorum
gctaataccggataacagta

SEQ ID NO: 47364 - DNA, 20 bp, Propionibacterium freudenreichii
ggttggaaagctttatgcgg

SEQ ID NO: 47365 - DNA, 20 bp, Cellulosimicrobium cellulans
tgcacgagaagccaccagag

SEQ ID NO: 47366 - DNA, 20 bp, Corynebacterium auris
atgggagctgtcgaaggtgg

SEQ ID NO: 47367 - DNA, 20 bp, Neisseria cinerea
ggggtccgcttaccacggta

SEQ ID NO: 47368 - DNA, 20 bp, Brevibacillus choshinensis
tggggactccaatcctcagt

SEQ ID NO: 47369 - DNA, 20 bp, Nocardia asteroides
gttgcttcggtaactgacct

SEQ ID NO: 47370 - DNA, 20 bp, Actinomyces viscosus
cttgacatgtgccggatggt

SEQ ID NO: 47371 - DNA, 20 bp, Bacteroides fragilis
gaggggcatcaggaagaaag

SEQ ID NO: 47372 - DNA, 20 bp, Facklamia sourekii
ggcgactttctggtctgaca

SEQ ID NO: 47373 - DNA, 20 bp, Campylobacter rectus
atatagctaatctgccctac

SEQ ID NO: 47374 - DNA, 20 bp, Bacillus schlegellii
aataccggatagattgtcct

SEQ ID NO: 47375 - DNA, 20 bp, Lactococcus garvieae
ttgtgtgcattggaaactgg

SEQ ID NO: 47376 - DNA, 20 bp, Clostridium ramosum
agtgcaggagaggatcgtgg

SEQ ID NO: 47377 - DNA, 20 bp, Proteus mirabilis
accttgcactatcggatgaa

SEQ ID NO: 47378 - DNA, 20 bp, Campylobacter concisus
tggcctgtcaaagggagctg

SEQ ID NO: 47379 - DNA, 20 bp, Lactococcus garvieae
agggagctataagttctctg

SEQ ID NO: 47380 - DNA, 20 bp, Bacteroides uniformis
taatacccgatggcatagtt

SEQ ID NO: 47381 - DNA, 20 bp, Campylobacter rectus
agctaatctgccctacacta

SEQ ID NO: 47382 - DNA, 20 bp, Prevotella bivia
actgtcagacttgagtgcgc

SEQ ID NO: 47383 - DNA, 20 bp, Neisseria subflava
catcagcggctgatgacggt

SEQ ID NO: 47384 - DNA, 20 bp, Dietzia maris
gtcgtttgtgaaaacccggg

SEQ ID NO: 47385 - DNA, 20 bp, Lactococcus lactis
tttaaacacaagttttaagt

SEQ ID NO: 47386 - DNA, 20 bp, Pasteurella aerogenes
tgaggaaggcggttagttta

SEQ ID NO: 47387 - DNA, 20 bp, Brevibacillus choshinensis
accgtggagggccacttgaa

SEQ ID NO: 47388 - DNA, 20 bp, Leptotrichia buccalis
gtgccgaagctaatgcgata

SEQ ID NO: 47389 - DNA, 20 bp, Lactococcus raffinolactis
agcggctctctggactgtca

SEQ ID NO: 47390 - DNA, 20 bp, Streptococcus hyovaginalis
ttcggggcactggtgacagg

SEQ ID NO: 47391 - DNA, 20 bp, Clostridium septicum
gtgtgggaggtatcaactcc

SEQ ID NO: 47392 - DNA, 20 bp, Gemella haemolysans
tatacacagtagagacggta

SEQ ID NO: 47393 - DNA, 20 bp, Tissierella praeacuta
aagtcgagcgaagtttttaa

SEQ ID NO: 47394 - DNA, 20 bp, Campylobacter sputorum
acttattgcgaaggcgatct

SEQ ID NO: 47395 - DNA, 20 bp, Micrococcus luteus
cccaccgcatggtgggtgtt

SEQ ID NO: 47396 - DNA, 20 bp, Streptococcus anginosus
taacagtatgtaacacatgt

SEQ ID NO: 47397 - DNA, 20 bp, Moraxella osloensis
gcactttaagcagggaggag

SEQ ID NO: 47398 - DNA, 20 bp, Corynebacterium glucuronolyticum
gctaatcgcgaaagccagtc

SEQ ID NO: 47399 - DNA, 20 bp, Moraxella bovis
caagccctgacgttacctac

SEQ ID NO: 47400 - DNA, 20 bp, Corynebacterium glucuronolyticum
gcatcgtggttggtgtggtg

SEQ ID NO: 47401 - DNA, 20 bp, Clostridium botulinum
actccccctgtgccgcagtt

SEQ ID NO: 47402 - DNA, 20 bp, Eggerthella lenta
accgccctcgggcggacatg

SEQ ID NO: 47403 - DNA, 20 bp, Leuconostoc lactis
agaatgtatctgatagtaac

SEQ ID NO: 47404 - DNA, 20 bp, Kingella denitrificans
gagtaacatattggaatgta

SEQ ID NO: 47405 - DNA, 20 bp, Corynebacterium group F
gatgctaatcgcacaaagcc

SEQ ID NO: 47406 - DNA, 20 bp, Helcococcus ovis
tcgggagtcaaatctcggtg

SEQ ID NO: 47407 - DNA, 20 bp, Streptococcus infantis
agcttgctcttctggatgag

SEQ ID NO: 47408 - DNA, 20 bp, Brevibacillus choshinensis
gttggggactccaatcctca

SEQ ID NO: 47409 - DNA, 20 bp, Prevotella corporis
acccctctccgcagttgcca

SEQ ID NO: 47410 - DNA, 20 bp, Tissierella praeacuta
aagtcagatgtgaaagatca

SEQ ID NO: 47411 - DNA, 20 bp, Acinetobacter calcoaceticus
gagcggagtgatggtgcttg

SEQ ID NO: 47412 - DNA, 20 bp, Proteus penneri
taatacctttatcaattgac

SEQ ID NO: 47413 - DNA, 20 bp, Actinomyces meyeri
gtcaagccgcaactgtgggt

SEQ ID NO: 47414 - DNA, 20 bp, Bacillus pallidus
aagggagcttgctcctttag

SEQ ID NO: 47415 - DNA, 20 bp, Atopobium parvulum
ggtctgttaggtcgggagtt

SEQ ID NO: 47416 - DNA, 20 bp, Eggerthella lenta
ggcaagggatggggtcgcgg

SEQ ID NO: 47417 - DNA, 20 bp, Streptococcus ratti
aagatgcaagagcatcacta

SEQ ID NO: 47418 - DNA, 20 bp, Atopobium parvulum
ccgagtcgattgcacccgaa

SEQ ID NO: 47419 - DNA, 20 bp, Brevibacillus parabrevis
tcagggacgaacacgtgccg

SEQ ID NO: 47420 - DNA, 20 bp, Aerococcus viridans
agtcgcaaacccgcgagggc

SEQ ID NO: 47421 - DNA, 20 bp, Photobacterium damselae
cagagaagcttgaagagatt

SEQ ID NO: 47422 - DNA, 20 bp, Kingella denitrificans
gggggtgcttgcacctgccg

SEQ ID NO: 47423 - DNA, 20 bp, Tissierella praeacuta
agtcaaagcgtaaagcggta

SEQ ID NO: 47424 - DNA, 20 bp, Weeksella virosa
ccagcgtttaaagacgggga

SEQ ID NO: 47425 - DNA, 20 bp, Anaerococcus prevotii
tcaaagctccggcggtctaa

SEQ ID NO: 47426 - DNA, 20 bp, Enterococcus cecorum
caatggagagtacaacgagt

SEQ ID NO: 47427 - DNA, 20 bp, Facklamia ignava
cgacgtcgcgaggccaagcg

SEQ ID NO: 47428 - DNA, 20 bp, Arcanobacterium haemolyticum
cactgaacaaggcgaaagtt

SEQ ID NO: 47429 - DNA, 20 bp, Campylobacter curvus
gaagaaatttgacggtaccc

SEQ ID NO: 47430 - DNA, 20 bp, Anaerococcus prevotii
gacgaataataccctatgat

SEQ ID NO: 47431 - DNA, 20 bp, Achromobacter xylosoxidans
aatgccgaagagatttggca

SEQ ID NO: 47432 - DNA, 20 bp, Fusobacterium mortiferum
tgaaagctatatgcgctgca

SEQ ID NO: 47433 - DNA, 20 bp, Corynebacterium propinquum
cggtacaatgcgcagcgagc

SEQ ID NO: 47434 - DNA, 20 bp, Corynebacterium falsenii
ggcccttgcttgcaggggta

SEQ ID NO: 47435 - DNA, 20 bp, Bacteroides fragilis
ttgcagttgatactgtcagt

SEQ ID NO: 47436 - DNA, 20 bp, Bacillus oleronius
cttgacctccctagagatag

SEQ ID NO: 47437 - DNA, 20 bp, Kytococcus sedentarius
gggaagaacatacgtgtaag

SEQ ID NO: 47438 - DNA, 20 bp, Cardiobacterium hominis
tccttacttgccagcacttt

SEQ ID NO: 47439 - DNA, 20 bp, Leuconostoc lactis
tgttggagaagaatgtatct

SEQ ID NO: 47440 - DNA, 20 bp, Photobacterium damselae
ggcatatacagagggcagca

SEQ ID NO: 47441 - DNA, 20 bp, Leptotrichia buccalis
taacgtttagccaatcttta

SEQ ID NO: 47442 - DNA, 20 bp, Fusobacterium mortiferum
aagctatatgcgctgcagga

SEQ ID NO: 47443 - DNA, 20 bp, Bacillus lentus
gctggcaactagaaccaagg

SEQ ID NO: 47444 - DNA, 20 bp, Arcanobacterium bernardiae
taacttcggggttgcagtgg

SEQ ID NO: 47445 - DNA, 20 bp, Pediococcus inopinatus
tgattttaactataaagtga

SEQ ID NO: 47446 - DNA, 20 bp, Corynebacterium urealyticum
ccgcccgtcgcgtcatgaaa

SEQ ID NO: 47447 - DNA, 20 bp, Porphyromonas endodontalis
ccgcgtcgatagttactaac

SEQ ID NO: 47448 - DNA, 20 bp, Oligella urethralis
ccatcaagagagcaagctct

SEQ ID NO: 47449 - DNA, 20 bp, Bacteroides ovatus
ttggaaacagtatagccgta

SEQ ID NO: 47450 - DNA, 20 bp, Anaerococcus prevotii
agatattaaaaagaataccg

SEQ ID NO: 47451 - DNA, 20 bp, Gemella morbillorum
tggatatgtagtaactatac

SEQ ID NO: 47452 - DNA, 20 bp, Streptococcus thoraltensis
aggagtaagagtggaaagtt

SEQ ID NO: 47453 - DNA, 20 bp, Clostridium cadaveris
tcgatacctctgtgccgccg

SEQ ID NO: 47454 - DNA, 20 bp, Lactococcus lactis
aaacacaagttttaagtttg

SEQ ID NO: 47455 - DNA, 20 bp, Streptococcus agalactiae
gctgaggtttggtgtttaca

SEQ ID NO: 47456 - DNA, 20 bp, Wolinella succinogenes
ggaaatcccttcggggacaa

SEQ ID NO: 47457 - DNA, 20 bp, Anaerococcus prevotii
attaagcaaacctcaaaaag

SEQ ID NO: 47458 - DNA, 20 bp, Streptococcus bovis
aacgctgactactttagctt

SEQ ID NO: 47459 - DNA, 20 bp, Oligella urethralis
ggccttcgtcccacacgcga

SEQ ID NO: 47460 - DNA, 20 bp, Bacillus schlegellii
acaccgggaaaccgggctaa

SEQ ID NO: 47461 - DNA, 20 bp, Eggerthella lenta
taatccgagggctcaacccc

SEQ ID NO: 47462 - DNA, 20 bp, Eikenella corrodens
tgctaataccactttttgct

SEQ ID NO: 47463 - DNA, 20 bp, Photobacterium damselae
gtagtgtagttaacacctgc

SEQ ID NO: 47464 - DNA, 20 bp, Streptococcus dysgalactiae
catgttaaacatttaaaagg

SEQ ID NO: 47465 - DNA, 20 bp, Veillonella parvula
cagtcagtctgtcttaaaag

SEQ ID NO: 47466 - DNA, 20 bp, Kingella kingae
tgttagggaagaaaaggttg

SEQ ID NO: 47467 - DNA, 20 bp, Pseudomonas fluorescens
tacctaatacgtgagtattt

SEQ ID NO: 47468 - DNA, 20 bp, Haemophilus actinemycetemcomitans
cagagggtaaccaaccagcg

SEQ ID NO: 47469 - DNA, 20 bp, Methylobacterium extorquens
acctcgagagatcggggatc

SEQ ID NO: 47470 - DNA, 20 bp, Clostridium subterminale
tataaaaccaatcccagttc

SEQ ID NO: 47471 - DNA, 20 bp, Tissierella praeacuta
acgagcagctacttagcgat

SEQ ID NO: 47472 - DNA, 20 bp, Peptoniphilus indolicus
gcttgacataatattgaccc

SEQ ID NO: 47473 - DNA, 20 bp, Enterobacter cloacae
ggcgacagggttaataaccc

SEQ ID NO: 47474 - DNA, 20 bp, Prevotella melaninogenica
cggagattaagtgtgttgtg

SEQ ID NO: 47475 - DNA, 20 bp, Proteus penneri
atacctttatcaattgacgt

SEQ ID NO: 47476 - DNA, 20 bp, Clostridium limosum
aatgattaaaggagtaatcc

SEQ ID NO: 47477 - DNA, 20 bp, Brevibacillus brevis
gcgtggaaagaacttcggtc

SEQ ID NO: 47478 - DNA, 20 bp, Clostridium botulinum
ggtatcaactccccctgtgc

SEQ ID NO: 47479 - DNA, 20 bp, Veillonella atypica
gtactacaatgggagttaat

SEQ ID NO: 47480 - DNA, 20 bp, Streptococcus bovis
acgctgactactttagcttg

SEQ ID NO: 47481 - DNA, 20 bp, Bacteroides thetaiotaomicron
gcagcatttcagtttgcttg

SEQ ID NO: 47482 - DNA, 20 bp, Propionibacterium avidum
ggtatgcctccttgtggggc

SEQ ID NO: 47483 - DNA, 20 bp, Rothia mucilaginosa
gtaacctacctttaactctg

SEQ ID NO: 47484 - DNA, 20 bp, Propionibacterium freudenreichii
tgtactggaagcgttcagag

SEQ ID NO: 47485 - DNA, 20 bp, Bacteroides capilosus
aaactgtagttcttgagtgc

SEQ ID NO: 47486 - DNA, 20 bp, Chryseobacterium meningosepticum
atctggggataaacctactt

SEQ ID NO: 47487 - DNA, 20 bp, Streptococcus canis
gaacttaaaaggggcaactg

SEQ ID NO: 47488 - DNA, 20 bp, Paenibacillus thiaminolyticus
agaacgctatggagagtaac

SEQ ID NO: 47489 - DNA, 20 bp, Enterococcus saccharolyticus
agtcgaacgcttcttttccg

SEQ ID NO: 47490 - DNA, 20 bp, Delftia acidovorans
aaaaagcttctcctaatacg

SEQ ID NO: 47491 - DNA, 20 bp, Fusobacterium nucleatum
tattatgattttaaggcatc

SEQ ID NO: 47492 - DNA, 20 bp, Mannheimia haemolytica
gaacagtcgattgacgttaa

SEQ ID NO: 47493 - DNA, 20 bp, Pediococcus dextrinicus
atctctaaaagctagtctca

SEQ ID NO: 47494 - DNA, 20 bp, Streptococcus hyovaginalis
cagtgaccatcctagagata

SEQ ID NO: 47495 - DNA, 20 bp, Bacteroides uniformis
cgatagttaccatcaggtta

SEQ ID NO: 47496 - DNA, 20 bp, Campylobacter concisus
cagagatacggtttcccttt

SEQ ID NO: 47497 - DNA, 20 bp, Neisseria meningitidis
cactcgagtcacccagttca

SEQ ID NO: 47498 - DNA, 20 bp, Brevibacillus thermoruber
agctaccacttgcggatggg

SEQ ID NO: 47499 - DNA, 20 bp, Pseudoramibacter alactolyticus
gagggactgccgtagacaat

SEQ ID NO: 47500 - DNA, 20 bp, Methylobacterium mesophilicum
atgccagctgttggggtgct

SEQ ID NO: 47501 - DNA, 20 bp, Enterococcus dispar
ttatttgaaaggcgcttttg

SEQ ID NO: 47502 - DNA, 20 bp, Streptococcus anginosus
aattgcatcgctagtagatg

SEQ ID NO: 47503 - DNA, 20 bp, Veillonella parvula
cgcatacgatctaacctcgg

SEQ ID NO: 47504 - DNA, 20 bp, Bordetella bronchiseptica
cctgtgcaactgacggtacc

SEQ ID NO: 47505 - DNA, 20 bp, Bacillus coagulans
atgttaaaagacggtttcgg

SEQ ID NO: 47506 - DNA, 20 bp, Clostridium clostridiiforme
atggtctggtgcgaaaaact

SEQ ID NO: 47507 - DNA, 20 bp, Anaerococcus tetradius
aagcaaaactcaaaaagcct

SEQ ID NO: 47508 - DNA, 20 bp, Anaerococcus tetradius
taagcaaaactcaaaaagcc

SEQ ID NO: 47509 - DNA, 20 bp, Facklamia sourekii
ggtgaaatcctacgggacaa

SEQ ID NO: 47510 - DNA, 20 bp, Alicyclobacillus acidocaldarius
cagacttgctcgaccgccta

SEQ ID NO: 47511 - DNA, 20 bp, Campylobacter rectus
ccttttcttgggaaagaatt

SEQ ID NO: 47512 - DNA, 20 bp, Globicatella sanguinis
ctaactcgcaagagcatgcc

SEQ ID NO: 47513 - DNA, 20 bp, Bacteroides forsythus
ccggatgccaatctccaaac

SEQ ID NO: 47514 - DNA, 20 bp, Acinetobacter calcoaceticus
taataccttcagatagtgga

SEQ ID NO: 47515 - DNA, 20 bp, Ignavigranum ruoffiae
tcttaaagctattctcagtt

SEQ ID NO: 47516 - DNA, 20 bp, Alcaligenes faecalis
ataatactgacgctcagaca

SEQ ID NO: 47517 - DNA, 20 bp, Haemophilus ducreyi
gtgatgaggaaggcagtttt

SEQ ID NO: 47518 - DNA, 20 bp, Streptococcus gallolyticus
accgcataatagtgtttaac

SEQ ID NO: 47519 - DNA, 20 bp, Cardiobacterium hominis
ggtcggtacagacggtagcg

SEQ ID NO: 47520 - DNA, 20 bp, Actinomyces naeslundii
ctggataaccgcatgaaagt

SEQ ID NO: 47521 - DNA, 20 bp, Alicyclobacillus acidocaldarius
cccatgccgctctccccgag

SEQ ID NO: 47522 - DNA, 20 bp, Bacteroides thetaiotaomicron
agcgtaggtggacagttaag

SEQ ID NO: 47523 - DNA, 20 bp, Clostridium subterminale
gtacaataagatgcaatacc

SEQ ID NO: 47524 - DNA, 20 bp, Actinomyces bovis
ccccgtgatgccatagaaac

SEQ ID NO: 47525 - DNA, 20 bp, Moraxella osloensis
attagatgagcctaaatcag

SEQ ID NO: 47526 - DNA, 20 bp, Corynebacterium propinquum
cgtcgtctgtgaaattccac

SEQ ID NO: 47527 - DNA, 20 bp, Alicyclobacillus acidocaldarius
agcagtttccaaagccatcc

SEQ ID NO: 47528 - DNA, 20 bp, Prevotella melaninogenica
cgcatactggtttccttgag

SEQ ID NO: 47529 - DNA, 20 bp, Peptoniphilus indolicus
acggggatagccaccggaaa

SEQ ID NO: 47530 - DNA, 20 bp, Dolosigranulum pigrum
ttcaaagccattctcagttc

SEQ ID NO: 47531 - DNA, 20 bp, Vibrio hollisae
caccatgggagtggaatccg

SEQ ID NO: 47532 - DNA, 20 bp, Propionibacterium avidum
tcgttcactgttgccagcac

SEQ ID NO: 47533 - DNA, 20 bp, Staphylococcus carnosus
aagtgcgtaggtaactatgc

SEQ ID NO: 47534 - DNA, 20 bp, Paenibacillus peoriae
gcttgcttctaaacaaccta

SEQ ID NO: 47535 - DNA, 20 bp, Eggerthella lenta
ggggcggaggcgtcgaaggt

SEQ ID NO: 47536 - DNA, 20 bp, Streptococcus dysgalactiae
gagtggaaaatccaccatgt

SEQ ID NO: 47537 - DNA, 20 bp, Anaerococcus prevotii
gagtcgtaaagttcttttat

SEQ ID NO: 47538 - DNA, 20 bp, Fusobacterium nucleatum
tactgcctacgatgagtagg

SEQ ID NO: 47539 - DNA, 20 bp, Stenotrophomonas maltophilia
agctggttaatacccggttg

SEQ ID NO: 47540 - DNA, 20 bp, Microbacterium hominis
atatgagctgcgatcgcatg

SEQ ID NO: 47541 - DNA, 20 bp, Actinomyces bovis
tgcttcttatatgacggtac

SEQ ID NO: 47542 - DNA, 20 bp, Pseudoramibacter alactolyticus
aatgctaggtgttggggaaa

SEQ ID NO: 47543 - DNA, 20 bp, Tetragenococcus halophilus
gcccccagctcaactgggga

SEQ ID NO: 47544 - DNA, 20 bp, Campylobacter lari
agttgagtagggaaagtttt

SEQ ID NO: 47545 - DNA, 20 bp, Facklamia hominis
cccttttgcgggggataacc

SEQ ID NO: 47546 - DNA, 20 bp, Bacillus coagulans
agatagttttttcctccgca

SEQ ID NO: 47547 - DNA, 20 bp, Moraxella osloensis
atgagcctaaatcagattag

SEQ ID NO: 47548 - DNA, 20 bp, Bacillus sp
gaaaacgtattatccggtat

SEQ ID NO: 47549 - DNA, 20 bp, Fusobacterium varium
agagctgcaaacctgcgagg

SEQ ID NO: 47550 - DNA, 20 bp, Bacillus lentus
tcatgcgtcgccgcttcgct

SEQ ID NO: 47551 - DNA, 20 bp, Gemella haemolysans
tttggttagacacagataca

SEQ ID NO: 47552 - DNA, 20 bp, Streptococcus suis
ttttcttcggaacactggtg

SEQ ID NO: 47553 - DNA, 20 bp, Leptotrichia buccalis
attactgggtgtgggcatga

SEQ ID NO: 47554 - DNA, 20 bp, Atopobium parvulum
ggtcgggagttaaatccggg

SEQ ID NO: 47555 - DNA, 20 bp, Bacteroides forsythus
tgccaatctccaaaccctgt

SEQ ID NO: 47556 - DNA, 20 bp, Moraxella lacunata
agcgatttaagtcgggaact

SEQ ID NO: 47557 - DNA, 20 bp, Tissierella praeacuta
ttttaaagaagatttcttcg

SEQ ID NO: 47558 - DNA, 20 bp, Streptococcus thermophilus
tgacacatgtcatttatttg

SEQ ID NO: 47559 - DNA, 20 bp, Tissierella praeacuta
atgagatttaagtcaaagcg

SEQ ID NO: 47560 - DNA, 20 bp, Corynebacterium accolens
agagtagatgttgcatgaca

SEQ ID NO: 47561 - DNA, 20 bp, Campylobacter lari
ccaacggcttaaccgttgaa

SEQ ID NO: 47562 - DNA, 20 bp, Bacteroides fragilis
tatgtatactgttttgtatg

SEQ ID NO: 47563 - DNA, 20 bp, Pseudoramibacter alactolyticus
gaatgctaggtgttggggaa

SEQ ID NO: 47564 - DNA, 20 bp, Propionibacterium freudenreichii
ccgccggggccaactcggag

SEQ ID NO: 47565 - DNA, 20 bp, Paenibacillus pabuli
tacaacgggctgtgaagccg

SEQ ID NO: 47566 - DNA, 20 bp, Bacillus fusiformis
tatagtttccccttcggggg

SEQ ID NO: 47567 - DNA, 20 bp, Anaerobiospirillum succiniciproducens
gcccttacggcagggctaca

SEQ ID NO: 47568 - DNA, 20 bp, Leptotrichia buccalis
gtccgtgccgaagctaatgc

SEQ ID NO: 47569 - DNA, 20 bp, Arcanobacterium bernardiae
ttcagtacagaacaaggcct

SEQ ID NO: 47570 - DNA, 20 bp, Gemella bergeri
ttttggcctgcaactgacac

SEQ ID NO: 47571 - DNA, 20 bp, Moraxella bovis
tgactatctagcttgctaga

SEQ ID NO: 47572 - DNA, 20 bp, Pasteurella multocida
cagagaagcttgcagagatg

SEQ ID NO: 47573 - DNA, 20 bp, Helcococcus kunzii
gctacctcgtgagagcaagc

SEQ ID NO: 47574 - DNA, 20 bp, Lactobacillus acidophilus
tcagcttataaaaggcggcg

SEQ ID NO: 47575 - DNA, 20 bp, Bacteroides merdae
ctgatagataggcatgcgtt

SEQ ID NO: 47576 - DNA, 20 bp, Porphyromonas endodontalis
attacagatgggcatgcgtc

SEQ ID NO: 47577 - DNA, 20 bp, Pantoea agglomerans
aaggcgatggggttaataac

SEQ ID NO: 47578 - DNA, 20 bp, Leuconostoc argentinum
gtcgaacgcgcagcgaaagg

SEQ ID NO: 47579 - DNA, 20 bp, Bacillus pumilus
tgaaccgcatggttcaagga

SEQ ID NO: 47580 - DNA, 20 bp, Actinomyces meyeri
tcaagccgcaactgtgggtt

SEQ ID NO: 47581 - DNA, 20 bp, Leptotrichia buccalis
ctaggcggccagacaagtct

SEQ ID NO: 47582 - DNA, 20 bp, Pasteurella multocida
gaggaaagggtgggacctta

SEQ ID NO: 47583 - DNA, 20 bp, Arcanobacterium bernardiae
tttcatcgcatggtgggggt

SEQ ID NO: 47584 - DNA, 20 bp, Aeromonas veronii
gttggtagctaataactgcc

SEQ ID NO: 47585 - DNA, 20 bp, Actinomyces naeslundii
ttttccgggtcttccgcgcc

SEQ ID NO: 47586 - DNA, 20 bp, Brevibacillus agri
agaaaagatggcttttcgct

SEQ ID NO: 47587 - DNA, 20 bp, Campylobacter rectus
actccttttcttgggaaaga

SEQ ID NO: 47588 - DNA, 20 bp, Facklamia ignava
gcgagaagcgacgtcgcgag

SEQ ID NO: 47589 - DNA, 20 bp, Campylobacter lari
tttgttagggaagaaccatg

SEQ ID NO: 47590 - DNA, 20 bp, Prevotella intermedia
aaagacggcctaatacccga

SEQ ID NO: 47591 - DNA, 20 bp, Alicyclobacillus acidocaldarius
acctgtgagtccccgcctca

SEQ ID NO: 47592 - DNA, 20 bp, Propionibacterium acnes
cttttggggtcggttcacag

SEQ ID NO: 47593 - DNA, 20 bp, Anaerobiospirillum succiniciproducens
agtggaacccacaaagcgtc

SEQ ID NO: 47594 - DNA, 20 bp, Campylobacter sputorum
cgaaccgcatggttcgatag

SEQ ID NO: 47595 - DNA, 20 bp, Suttonella indologenes
agccttctggggcaatactg

SEQ ID NO: 47596 - DNA, 20 bp, Tissierella praeacuta
cagctacttagcgataagat

SEQ ID NO: 47597 - DNA, 20 bp, Streptococcus parasanguinis
acttgaaaggtgcaaatgca

SEQ ID NO: 47598 - DNA, 20 bp, Neisseria polysaccharea
aaggctgttgctaatatcag

SEQ ID NO: 47599 - DNA, 20 bp, Bacillus simplex
ttctcgcatgagagaagatg

SEQ ID NO: 47600 - DNA, 20 bp, Bacteroides capilosus
actgtagttcttgagtgctg

SEQ ID NO: 47601 - DNA, 20 bp, Peptostreptococcus anaerobius
aacacccgaagccgattatc

SEQ ID NO: 47602 - DNA, 20 bp, Bacillus mycoides
ttgaactgcatagttcgaaa

SEQ ID NO: 47603 - DNA, 20 bp, Porphyromonas endodontalis
ggggactgagaggttgaccc

SEQ ID NO: 47604 - DNA, 20 bp, Pseudomonas luteola
cgtaggtggcttggtaagtt

SEQ ID NO: 47605 - DNA, 20 bp, Neisseria subflava
aggctgttgctaacatcagc

SEQ ID NO: 47606 - DNA, 20 bp, Dermacoccus nishinomiyaensis
gcttgctggtgtggattagt

SEQ ID NO: 47607 - DNA, 20 bp, Empedobacter brevis
gtaggcggattaatcagtca

SEQ ID NO: 47608 - DNA, 20 bp, Veillonella dispar
tagatgaaaggtggcctcta

SEQ ID NO: 47609 - DNA, 20 bp, Paenibacillus lautus
taccggataatttatttcac

SEQ ID NO: 47610 - DNA, 20 bp, Paenibacillus validus
tagctggtttctccgcatgg

SEQ ID NO: 47611 - DNA, 20 bp, Campylobacter lari
aagttgagtagggaaagttt

SEQ ID NO: 47612 - DNA, 20 bp, Helcococcus kunzii
aagcgaatcgcataaaacag

SEQ ID NO: 47613 - DNA, 20 bp, Tetragenococcus halophilus
tttctatgacggtagctgac

SEQ ID NO: 47614 - DNA, 20 bp, Facklamia sourekii
tctcttgacgtgagtggcgg

SEQ ID NO: 47615 - DNA, 20 bp, Clostridium limosum
aaatgattaaaggagtaatc

SEQ ID NO: 47616 - DNA, 20 bp, Bacillus alcalophilus
caaaggaatcacatggttct

SEQ ID NO: 47617 - DNA, 20 bp, Streptococcus suis
ccgcataacagtatttaccg

SEQ ID NO: 47618 - DNA, 20 bp, Cardiobacterium hominis
cagctttctgggtcgatact

SEQ ID NO: 47619 - DNA, 20 bp, Tetragenococcus halophilus
cgtcactgatggctggtccc

SEQ ID NO: 47620 - DNA, 20 bp, Shewanella algae
gggccttgcgctgatggata

SEQ ID NO: 47621 - DNA, 20 bp, Neisseria meningitidis
actcgagtcacccagttcag

SEQ ID NO: 47622 - DNA, 20 bp, Rothia mucilaginosa
tacctgcagagaaagcgccg

SEQ ID NO: 47623 - DNA, 20 bp, Alicyclobacillus acidocaldarius
ccccatgccgctctccccga

SEQ ID NO: 47624 - DNA, 20 bp, Actinomyces odontolyticus
tgtggtggcatttagttggt

SEQ ID NO: 47625 - DNA, 20 bp, Providencia alcalifaciens
tgctttgctccttagagatt

SEQ ID NO: 47626 - DNA, 20 bp, Corynebacterium auris
tttgtgtaagtccatggctt

SEQ ID NO: 47627 - DNA, 20 bp, Streptococcus dysgalactiae
tccaccatgtgacggtaact

SEQ ID NO: 47628 - DNA, 20 bp, Paenibacillus apiarius
ctgcatgacttgagtacaga

SEQ ID NO: 47629 - DNA, 20 bp, Prevotella bivia
tccttaaaaccattctcagt

SEQ ID NO: 47630 - DNA, 20 bp, Campylobacter coli
tacactagttgttggggtgc

SEQ ID NO: 47631 - DNA, 20 bp, Atopobium parvulum
ttcgggtgtgtataaagtgg

SEQ ID NO: 47632 - DNA, 20 bp, Fusobacterium varium
agactgggacaacatttgga

SEQ ID NO: 47633 - DNA, 20 bp, Streptococcus mitis
ttgcatgacatttgcttaaa

SEQ ID NO: 47634 - DNA, 20 bp, Haemophilus actinomycetomicans
gagacgaaagtgcgggacct

SEQ ID NO: 47635 - DNA, 20 bp, Nocardia asteroides
gagcgggggaggttgcttcg

SEQ ID NO: 47636 - DNA, 20 bp, Helcococcus ovis
agagattaaagaaggaaagt

SEQ ID NO: 47637 - DNA, 20 bp, Clostridium botulinum
atgaagcttcttcggaagtg

SEQ ID NO: 47638 - DNA, 20 bp, Campylobacter curvus
ctatgggatgaggctatatc

SEQ ID NO: 47639 - DNA, 20 bp, Bacteroides uniformis
ggaactattaaagaatttcg

SEQ ID NO: 47640 - DNA, 20 bp, Streptococcus thermophilus
ccgcataacaatggatgaca

SEQ ID NO: 47641 - DNA, 20 bp, Facklamia languida
actcgcaagggcaagcgaat

SEQ ID NO: 47642 - DNA, 20 bp, Micrococcus luteus
gataggagcgcccaccgcat

SEQ ID NO: 47643 - DNA, 20 bp, Granulicatella elegans
aagaaggaaaagaggcttcg

SEQ ID NO: 47644 - DNA, 20 bp, Leptotrichia buccalis
gtagatatgtgcaggaatgc

SEQ ID NO: 47645 - DNA, 20 bp, Actinomyces odontolyticus
ggaaaggtttgttctggtgg

SEQ ID NO: 47646 - DNA, 20 bp, Facklamia ignava
aataccgcatagttgttcca

SEQ ID NO: 47647 - DNA, 20 bp, Bacteroides ureolyticus
agggatgctaaaatagctac

SEQ ID NO: 47648 - DNA, 20 bp, Corynebacterium group F
aatcgcacaaagccggcctt

SEQ ID NO: 47649 - DNA, 20 bp, Bacillus coagulans
ctgttcccctgaggagtggc

SEQ ID NO: 47650 - DNA, 20 bp, Helcococcus ovis
agtttcttcggaaacttgta

SEQ ID NO: 47651 - DNA, 20 bp, Bacteroides fragilis
aataaagtgcagtatgtata

SEQ ID NO: 47652 - DNA, 20 bp, Clostridium paraputrificum
attgtagcttcgcatgaagt

SEQ ID NO: 47653 - DNA, 20 bp, Prevotella oris
tgcagcgcgaactggtccac

SEQ ID NO: 47654 - DNA, 20 bp, Bacillus pumilus
cggatagttccttgaaccgc

SEQ ID NO: 47655 - DNA, 20 bp, Prevotella melaninogenica
atgacgcccttcggggtctc

SEQ ID NO: 47656 - DNA, 20 bp, Corynebacterium xerosis
cgtgagggtgtggtggaaag

SEQ ID NO: 47657 - DNA, 20 bp, Streptococcus thoraltensis
gtaagagtggaaagtttact

SEQ ID NO: 47658 - DNA, 20 bp, Helcococcus kunzii
ggtctgaacaaagcgcagct

SEQ ID NO: 47659 - DNA, 20 bp, Bacillus alcalophilus
atcggggctcaaccccgagg

SEQ ID NO: 47660 - DNA, 20 bp, Lactococcus garvieae
agaagcaattgcttcactac

SEQ ID NO: 47661 - DNA, 20 bp, Brevibacillus choshinensis
ctttggtcacgtacagatgg

SEQ ID NO: 47662 - DNA, 20 bp, Clostridium ramosum
gtaaacttctgttataaagg

SEQ ID NO: 47663 - DNA, 20 bp, Streptococcus thoraltensis
catgcaagtggaacgcattt

SEQ ID NO: 47664 - DNA, 20 bp, Enterococcus cecorum
tcaccgtagcttgctacacc

SEQ ID NO: 47665 - DNA, 20 bp, Bacteroides eggerthii
agtcaacgatggataggggt

SEQ ID NO: 47666 - DNA, 20 bp, Geobacillus thermoglucosidasius
tgcaagtcgagcggaccggg

SEQ ID NO: 47667 - DNA, 20 bp, Bacteroides thetaiotaomicron
aattttgtatgtaccatatg

SEQ ID NO: 47668 - DNA, 20 bp, Ewingella americana
tgggcttgacccgtggcttc

SEQ ID NO: 47669 - DNA, 20 bp, Haemophilus segnis
agtcgagagacgaaagtgcg

SEQ ID NO: 47670 - DNA, 20 bp, Brevibacillus choshinensis
tcagaccgcatggtctgaaa

SEQ ID NO: 47671 - DNA, 20 bp, Corynebacterium glucuronolyticum
ccctataggaccgcatcgtg

SEQ ID NO: 47672 - DNA, 20 bp, Corynebacterium mycetoides
gtacaacgcgtgtgcgacac

SEQ ID NO: 47673 - DNA, 20 bp, Turicella otitidis
tgagggtcttttcacgactt

SEQ ID NO: 47674 - DNA, 20 bp, Prevotella loescheii
catgtggtttaattcgatga

SEQ ID NO: 47675 - DNA, 20 bp, Bacillus cereus
ttgagagcttgctctcaaga

SEQ ID NO: 47676 - DNA, 20 bp, Bacillus mycoides
tattttgaactgcatagttc

SEQ ID NO: 47677 - DNA, 20 bp, Paenibacillus amylolyticus
ctggggagataatgaaagac

SEQ ID NO: 47678 - DNA, 20 bp, Campylobacter lari
ggggtgctagtcatctcagt

SEQ ID NO: 47679 - DNA, 20 bp, Leptotrichia buccalis
atagttcactggacggtaac

SEQ ID NO: 47680 - DNA, 20 bp, Sporosarcina ureae
atggacgatacagagggctg

SEQ ID NO: 47681 - DNA, 20 bp, Gemella haemolysans
acaagagattgtgttgttct

SEQ ID NO: 47682 - DNA, 20 bp, Delftia acidovorans
actggttgttgggaattagt

SEQ ID NO: 47683 - DNA, 20 bp, Empedobacter brevis
gctgaaggtaccagaagaat

SEQ ID NO: 47684 - DNA, 20 bp, Kingella denitrificans
aagaaaagggaagtgttaat

SEQ ID NO: 47685 - DNA, 20 bp, Moraxella lacunata
cctacaagccctgacgttac

SEQ ID NO: 47686 - DNA, 20 bp, Corynebacterium glucuronolyticum
cttgacatatgtgagattgg

SEQ ID NO: 47687 - DNA, 20 bp, Anaerococcus prevotii
atagtgatattaagcaaacc

SEQ ID NO: 47688 - DNA, 20 bp, Streptococcus constellatus
ggacgacgctggcggcgtgc

SEQ ID NO: 47689 - DNA, 20 bp, Fusobacterium mortiferum
ttgggacgaagtaagtgacg

SEQ ID NO: 47690 - DNA, 20 bp, Corynebacterium glucuronolyticum
gggggataagcttgggaaac

SEQ ID NO: 47691 - DNA, 20 bp, Actinomyces bovis
gcttaaccccgtgatgccat

SEQ ID NO: 47692 - DNA, 20 bp, Helcococcus kunzii
ctaagaagcaagccctggct

SEQ ID NO: 47693 - DNA, 20 bp, Finegoldia magna
gagtagtggagaggaaagtg

SEQ ID NO: 47694 - DNA, 20 bp, Bacteroides thetaiotaomicron
aggtggacagttaagtcagt

SEQ ID NO: 47695 - DNA, 20 bp, Paenibacillus validus
gaagaacgcctcggagagta

SEQ ID NO: 47696 - DNA, 20 bp, Paenibacillus amylolyticus
tggtgtttaaggccaaggct

SEQ ID NO: 47697 - DNA, 20 bp, Clostridium histolyticum
gtgtcggggtttcaatactc

SEQ ID NO: 47698 - DNA, 20 bp, Acinetobacter baumannii
agcttgctactggacctagc

SEQ ID NO: 47699 - DNA, 20 bp, Cardiobacterium hominis
cgcatgggaatctgcctttt

SEQ ID NO: 47700 - DNA, 20 bp, Prevotella melaninogenica
acttgcagcgcatactggtt

SEQ ID NO: 47701 - DNA, 20 bp, Pseudoramibacter alactolyticus
agaaaacatgacggtaccca

SEQ ID NO: 47702 - DNA, 20 bp, Acinetobacter johnsonii
tacttggattaatactctag

SEQ ID NO: 47703 - DNA, 20 bp, Staphylococcus aureus
agcttctcgtccgttcgctc

SEQ ID NO: 47704 - DNA, 20 bp, Leptotrichia buccalis
agttcactggacggtaactg

SEQ ID NO: 47705 - DNA, 20 bp, Fusobacterium nucleatum
aacagagagtcgcaaagctg

SEQ ID NO: 47706 - DNA, 20 bp, Bacillus sp
gctcgttccacatgcgtcac

SEQ ID NO: 47707 - DNA, 20 bp, Chryseobacterium meningosepticum
ataggatgcaaatctcgaaa

SEQ ID NO: 47708 - DNA, 20 bp, Corynebacterium glucuronolyticum
aataccctataggaccgcat

SEQ ID NO: 47709 - DNA, 20 bp, Acinetobacter calcoaceticus
cttgcactatcacttagcgg

SEQ ID NO: 47710 - DNA, 20 bp, Oligella ureolytica
cacttttctcaacgaagaaa

SEQ ID NO: 47711 - DNA, 20 bp, Facklamia hominis
acgaccgctagagtaactgt

SEQ ID NO: 47712 - DNA, 20 bp, Haemophilus influenzae
gcacatcaaattgacgttaa

SEQ ID NO: 47713 - DNA, 20 bp, Methylobacterium mesophilicum
tgccagctgttggggtgctt

SEQ ID NO: 47714 - DNA, 20 bp, Fusobacterium necrophorum
cacatgcaagtcgactcgag

SEQ ID NO: 47715 - DNA, 20 bp, Methylobacterium mesophilicum
ttgctgccggaggatcggcc

SEQ ID NO: 47716 - DNA, 20 bp, Dermabacter hominis
cactttgggataactccgag

SEQ ID NO: 47717 - DNA, 20 bp, Tetragenococcus halophilus
tcagcaaagaacaggagaaa

SEQ ID NO: 47718 - DNA, 20 bp, Propionibacterium freudenreichii
aggcccctttcggggggtac

SEQ ID NO: 47719 - DNA, 20 bp, Turicella otitidis
gataggagccatttttagtg

SEQ ID NO: 47720 - DNA, 20 bp, Bacillus sp
ttttctctccgcatggagag

SEQ ID NO: 47721 - DNA, 20 bp, Streptococcus thermophilus
ttgcgagtcggtgacggcga

SEQ ID NO: 47722 - DNA, 20 bp, Facklamia ignava
agcactgttatcagagaaga

SEQ ID NO: 47723 - DNA, 20 bp, Eubacterium moniliforme
gcttaaccgtaaggagagag

SEQ ID NO: 47724 - DNA, 20 bp, Veillonella atypica
gacattgatggacagaacca

SEQ ID NO: 47725 - DNA, 20 bp, Enterococcus dispar
ggcgcttttgcgtcacttga

SEQ ID NO: 47726 - DNA, 20 bp, Brochothrix campestris
gaatgtgctgaacatcataa

SEQ ID NO: 47727 - DNA, 20 bp, Sporosarcina pasteurii
gccccttagtgctggagcaa

SEQ ID NO: 47728 - DNA, 20 bp, Propionibacterium avidum
ccggtggcctaacctgtgtg

SEQ ID NO: 47729 - DNA, 20 bp, Bacillus pallidus
ctcgcggctcaaccgcgagc

SEQ ID NO: 47730 - DNA, 20 bp, Actinomyces naeslundii
gggggccttttccgggtctt

SEQ ID NO: 47731 - DNA, 20 bp, Anaerococcus tetradius
tgatttcttcggaatgaaaa

SEQ ID NO: 47732 - DNA, 20 bp, Paenibacillus larvae
gataacttgcggaaacgtga

SEQ ID NO: 47733 - DNA, 20 bp, Alcaligenes faecalis
tgtaggcggttcggaaagaa

SEQ ID NO: 47734 - DNA, 20 bp, Bacillus sp
gcttgcgccgccttttaacg

SEQ ID NO: 47735 - DNA, 20 bp, Prevotella intermedia
gatgcccgctgttagcgcct

SEQ ID NO: 47736 - DNA, 20 bp, Moraxella atlantae
agaagtaggtagcctaacgc

SEQ ID NO: 47737 - DNA, 20 bp, Leptotrichia buccalis
ggcagtgccttcgggaacgt

SEQ ID NO: 47738 - DNA, 20 bp, Enterococcus raffinosus
tttctatttgaaaggcgctt

SEQ ID NO: 47739 - DNA, 20 bp, Vagococcus fluvialis
acaagtgggagagtaactgt

SEQ ID NO: 47740 - DNA, 20 bp, Vibrio cholerae
catatccggtagcgcaaggc

SEQ ID NO: 47741 - DNA, 20 bp, Leptotrichia buccalis
gccaaggcggacgggtgagt

SEQ ID NO: 47742 - DNA, 20 bp, Peptostreptococcus anaerobius
taacctgccctatacacatg

SEQ ID NO: 47743 - DNA, 20 bp, Clostridium septicum
cggcgtgcctaacacatgca

SEQ ID NO: 47744 - DNA, 20 bp, Actinomyces bovis
gccttcgggttgtaaagctc

SEQ ID NO: 47745 - DNA, 20 bp, Alicyclobacillus acidocaldarius
tcccatggttgagccatgga

SEQ ID NO: 47746 - DNA, 20 bp, Facklamia ignava
tttgacggtaactgatcaga

SEQ ID NO: 47747 - DNA, 20 bp, Kytococcus sedentarius
gacatgcactggatcgcctc

SEQ ID NO: 47748 - DNA, 20 bp, Peptostreptococcus anaerobius
gaaaagtttactaatacatg

SEQ ID NO: 47749 - DNA, 20 bp, Bacteroides vulgatus
aaggcatctgtgaaggtgct

SEQ ID NO: 47750 - DNA, 20 bp, Eggerthella lenta
ggggctccgccctccgtgcc

SEQ ID NO: 47751 - DNA, 20 bp, Clostridium limosum
tcctgtggaaacacgggagt

SEQ ID NO: 47752 - DNA, 20 bp, Empedobacter brevis
tacgcagaacaccaattgcg

SEQ ID NO: 47753 - DNA, 20 bp, Burkholderia multivorans
atacagtcgggggatgacgg

SEQ ID NO: 47754 - DNA, 20 bp, Fusobacterium nucleatum
agagttgcaaagccgtgagg

SEQ ID NO: 47755 - DNA, 20 bp, Tissierella praeacuta
acagcgatgggtagccggcc

SEQ ID NO: 47756 - DNA, 20 bp, Cellulomonas turbata
ccctgcatggggagtgtctg

SEQ ID NO: 47757 - DNA, 20 bp, Clostridium tetani
tgaaactttaaccaaaggag

SEQ ID NO: 47758 - DNA, 20 bp, Bacillus flexus
aagcttgcttctatgacgtt

SEQ ID NO: 47759 - DNA, 20 bp, Haemophilus actinemycetemcomitans
ggtaaccaaccagcgatggg

SEQ ID NO: 47760 - DNA, 20 bp, Campylobacter rectus
gatcaagaagaatacccatt

SEQ ID NO: 47761 - DNA, 20 bp, Corynebacterium glucuronolyticum
ttgggctagagatagttcgt

SEQ ID NO: 47762 - DNA, 20 bp, Streptococcus thermophilus
gatgacacatgtcatttatt

SEQ ID NO: 47763 - DNA, 20 bp, Vibrio cholerae
cagcgtctccgctagattct

SEQ ID NO: 47764 - DNA, 20 bp, Pediococcus inopinatus
ggttttcttttaaaagatgg

SEQ ID NO: 47765 - DNA, 20 bp, Fusobacterium mortiferum
ccctgcagtctgggacaaca

SEQ ID NO: 47766 - DNA, 20 bp, Cardiobacterium hominis
tgtcaactaggcgtcgggtt

SEQ ID NO: 47767 - DNA, 20 bp, Alicyclobacillus acidocaldarius
cctcgcgggcgtatccggca

SEQ ID NO: 47768 - DNA, 20 bp, Neisseria subflava
taacatcagcggctgatgac

SEQ ID NO: 47769 - DNA, 20 bp, Streptococcus gordonii
tgctacaccatagactgtga

SEQ ID NO: 47770 - DNA, 20 bp, Chromobacterium violaceum
tgcgtcggaatgtaccgtgt

SEQ ID NO: 47771 - DNA, 20 bp, Moraxella lacunata
ttacgagagaaagggggctt

SEQ ID NO: 47772 - DNA, 20 bp, Streptococcus constellatus
tacatgcaagtagaccgcac

SEQ ID NO: 47773 - DNA, 20 bp, Chromobacterium violaceum
cgtcggaatgtaccgtgtaa

SEQ ID NO: 47774 - DNA, 20 bp, Prevotella denticola
gctcaacgtctgaattgcag

SEQ ID NO: 47775 - DNA, 20 bp, Haemophilus paraphrophilus
cgaggaaggttgttgtgtga

SEQ ID NO: 47776 - DNA, 20 bp, Fusobacterium nucleatum
ttaggaatgagacagagatg

SEQ ID NO: 47777 - DNA, 20 bp, Corynebacterium glucuronolyticum
ttgacatatgtgagattggg

SEQ ID NO: 47778 - DNA, 20 bp, Facklamia sourekii
cgttaacgcaataaacactc

SEQ ID NO: 47779 - DNA, 20 bp, Anaerococcus tetradius
cgaagaataataccctataa

SEQ ID NO: 47780 - DNA, 20 bp, Morganella morganii
gcaggcggttgattgagtca

SEQ ID NO: 47781 - DNA, 20 bp, Tetragenococcus halophilus
gctttttccatgacggtagc

SEQ ID NO: 47782 - DNA, 20 bp, Gemella morbillorum
taaggagggagccggtcacg

SEQ ID NO: 47783 - DNA, 20 bp, Chromobacterium violaceum
cgttatacgagcagccgacg

SEQ ID NO: 47784 - DNA, 20 bp, Prevotella bivia
gatgcccgctgttagcacct

SEQ ID NO: 47785 - DNA, 20 bp, Campylobacter concisus
agagatggtctttccccctt

SEQ ID NO: 47786 - DNA, 20 bp, Clostridium clostridiiforme
gacggcgaagcaagtctgaa

SEQ ID NO: 47787 - DNA, 20 bp, Anaerococcus prevotii
taagcaaacctcaaaaagtc

SEQ ID NO: 47788 - DNA, 20 bp, Kingella denitrificans
aataccactttttgttgacg

SEQ ID NO: 47789 - DNA, 20 bp, Actinomyces bovis
gagaaattcagtgctgtagt

SEQ ID NO: 47790 - DNA, 20 bp, Bacillus sp
cctatctctagggccgtcag

SEQ ID NO: 47791 - DNA, 20 bp, Turicella otitidis
gtgagggtcttttcacgact

SEQ ID NO: 47792 - DNA, 20 bp, Arcanobacterium haemolyticum
gctggcggcgtgcttaaaca

SEQ ID NO: 47793 - DNA, 20 bp, Veillonella atypica
gcttgcttctatcaatctta

SEQ ID NO: 47794 - DNA, 20 bp, Rothia mucilaginosa
cggatacgaccaatctccgc

SEQ ID NO: 47795 - DNA, 20 bp, Actinomyces bovis
aagggaagaacgataggaag

SEQ ID NO: 47796 - DNA, 20 bp, Fusobacterium nucleatum
taatacctaatattatgata

SEQ ID NO: 47797 - DNA, 20 bp, Eggerthella lenta
tctaatccgagggctcaacc

SEQ ID NO: 47798 - DNA, 20 bp, Clostridium clostridiiforme
acactgggggataacagtta

SEQ ID NO: 47799 - DNA, 20 bp, Gemella haemolysans
attaactgcatggttgatgt

SEQ ID NO: 47800 - DNA, 20 bp, Tissierella praeacuta
accgtggtaagcatttgaaa

SEQ ID NO: 47801 - DNA, 20 bp, Brevibacillus thermoruber
agccaatctcttaaaaccag

SEQ ID NO: 47802 - DNA, 20 bp, Veillonella dispar
ggatagatgaaaggtggcct

SEQ ID NO: 47803 - DNA, 20 bp, Corynebacterium xerosis
gtgagggtgtggtggaaagt

SEQ ID NO: 47804 - DNA, 20 bp, Brevibacterium epidermidis
gttcttctctttggagctgg

SEQ ID NO: 47805 - DNA, 20 bp, Helcococcus kunzii
aaggaaagtagcgaacgggt

SEQ ID NO: 47806 - DNA, 20 bp, Tetragenococcus halophilus
agcgaatctctgaaagcttc

SEQ ID NO: 47807 - DNA, 20 bp, Acinetobacter lwoffii
aggctaccgagattaatact

SEQ ID NO: 47808 - DNA, 20 bp, Brochothrix campestris
aatgtgctgaacatcataag

SEQ ID NO: 47809 - DNA, 20 bp, Helcococcus ovis
ggaatctaactgacgctgag

SEQ ID NO: 47810 - DNA, 20 bp, Bacillus firmus
agatggcatctcgctatcac

SEQ ID NO: 47811 - DNA, 20 bp, Tetragenococcus halophilus
atggctggtcccgcggtgca

SEQ ID NO: 47812 - DNA, 20 bp, Propionibacterium propionicus
ttctggcggtgggggatgga

SEQ ID NO: 47813 - DNA, 20 bp, Vibrio hollisae
tgggagtggaatccgccaga

SEQ ID NO: 47814 - DNA, 20 bp, Anaerobiospirillum succiniciproducens
gggcgtacagagggaaacga

SEQ ID NO: 47815 - DNA, 20 bp, Arcanobacterium bernardiae
gggggttggaaagggtttct

SEQ ID NO: 47816 - DNA, 20 bp, Peptostreptococcus anaerobius
ctgttgcaggggaagataat

SEQ ID NO: 47817 - DNA, 20 bp, Actinomyces neuii
tttttggtgagagtggcgaa

SEQ ID NO: 47818 - DNA, 20 bp, Streptococcus porcinus
aagtagaagacccatgtcat

SEQ ID NO: 47819 - DNA, 20 bp, Arcanobacterium bernardiae
ataccggatattctgctttc

SEQ ID NO: 47820 - DNA, 20 bp, Helcococcus ovis
aatctaactgacgctgaggt

SEQ ID NO: 47821 - DNA, 20 bp, Actinomyces bovis
ggcttatggcgcattagtta

SEQ ID NO: 47822 - DNA, 20 bp, Streptococcus thermophilus
ataaaagtcgatatcgcatg

SEQ ID NO: 47823 - DNA, 20 bp, Proteus vulgaris
tttgtcaattgacgttaccc

SEQ ID NO: 47824 - DNA, 20 bp, Corynebacterium falsenii
tttctacgatttccgtgccg

SEQ ID NO: 47825 - DNA, 20 bp, Chromobacterium violaceum
tagctgttgggggtttgaat

SEQ ID NO: 47826 - DNA, 20 bp, Streptococcus thermophilus
acaacgagttgcgagtcggt

SEQ ID NO: 47827 - DNA, 20 bp, Peptostreptococcus anaerobius
gtcggtggttaaaggctacg

SEQ ID NO: 47828 - DNA, 20 bp, Streptococcus gordonii
ttgcatgataattaattgaa

SEQ ID NO: 47829 - DNA, 20 bp, Chromobacterium violaceum
ttgaatccttggtagcgtag

SEQ ID NO: 47830 - DNA, 20 bp, Enterococcus cecorum
ggatgagagtggaaagttca

SEQ ID NO: 47831 - DNA, 20 bp, Brevibacillus centrosporus
gggctgtcgctataggatgg

SEQ ID NO: 47832 - DNA, 20 bp, Clostridium paraputrificum
cctgaattaccatgtaatgt

SEQ ID NO: 47833 - DNA, 20 bp, Leptotrichia buccalis
tgccagcacgcatgtgcccg

SEQ ID NO: 47834 - DNA, 20 bp, Bacillus sp
aagagcttgcttttgatcag

SEQ ID NO: 47835 - DNA, 20 bp, Tissierella praeacuta
cagatgtgaaagatcacggc

SEQ ID NO: 47836 - DNA, 20 bp, Facklamia ignava
tcctacgggacaagaagaca

SEQ ID NO: 47837 - DNA, 20 bp, Streptococcus hyovaginalis
agaacgggagtaagagtgga

SEQ ID NO: 47838 - DNA, 20 bp, Streptococcus parauberis
gactggtgcttgcactagtc

SEQ ID NO: 47839 - DNA, 20 bp, Clostridium butyricum
gcaaaactataaaaccgatc

SEQ ID NO: 47840 - DNA, 20 bp, Corynebacterium glucuronolyticum
gccctgcactgggggataag

SEQ ID NO: 47841 - DNA, 20 bp, Leptotrichia buccalis
tgtttggctagagtgctgga

SEQ ID NO: 47842 - DNA, 20 bp, Vibrio hollisae
gagtggaatccgccagaagt

SEQ ID NO: 47843 - DNA, 20 bp, Corynebacterium jeikeium
tatttacgattcccgtgccg

SEQ ID NO: 47844 - DNA, 20 bp, Photobacterium damselae
gaaggtagtgtagttaacac

SEQ ID NO: 47845 - DNA, 20 bp, Bacillus coagulans
actctgttgccggggaagaa

SEQ ID NO: 47846 - DNA, 20 bp, Bacteroides forsythus
tgttaagtccgcggtgaaag

SEQ ID NO: 47847 - DNA, 20 bp, Microbacterium hominis
agctgcgatcgcatggtcag

SEQ ID NO: 47848 - DNA, 20 bp, Porphyromonas endodontalis
agcgacatggtgacatgaag

SEQ ID NO: 47849 - DNA, 20 bp, Anaerococcus tetradius
agcttttaaaactgttaggc

SEQ ID NO: 47850 - DNA, 20 bp, Acinetobacter calcoaceticus
tgcactatcacttagcggcg

SEQ ID NO: 47851 - DNA, 20 bp, Propionibacterium propionicus
gcgtgagtaacctgcccccc

SEQ ID NO: 47852 - DNA, 20 bp, Aerococcus christensenii
caccaaggtgatgatgcata

SEQ ID NO: 47853 - DNA, 20 bp, Aneurinibacillus thermoaerophilus
accgccgggatgacctcccg

SEQ ID NO: 47854 - DNA, 20 bp, Facklamia ignava
cagagaagaatagcctgtag

SEQ ID NO: 47855 - DNA, 20 bp, Alicyclobacillus acidocaldarius
gcttcgcctccctttgttcc

SEQ ID NO: 47856 - DNA, 20 bp, Fusobacterium nucleatum
aaggcatcttagaattatga

SEQ ID NO: 47857 - DNA, 20 bp, Weeksella virosa
atggatacttgctgttgggt

SEQ ID NO: 47858 - DNA, 20 bp, Clostridium clostridiiforme
gagctgccgaaggcggggca

SEQ ID NO: 47859 - DNA, 20 bp, Bacillus lentus
gctaaccaacaaaaagcaag

SEQ ID NO: 47860 - DNA, 20 bp, Gemella bergeri
gttggtctcaaaagagatca

SEQ ID NO: 47861 - DNA, 20 bp, Streptococcus agalactiae
gagtaattaacacatgttag

SEQ ID NO: 47862 - DNA, 20 bp, Bacteroides forsythus
gctaccgggcgaccggatgc

SEQ ID NO: 47863 - DNA, 20 bp, Peptoniphilus indolicus
gtagtgaagaggtaagtgga

SEQ ID NO: 47864 - DNA, 20 bp, Fusobacterium nucleatum
atatttcagtgtcccttcgg

SEQ ID NO: 47865 - DNA, 20 bp, Clostridium sordellii
acgctgacggcgtgcctaac

SEQ ID NO: 47866 - DNA, 20 bp, Fusobacterium varium
catcccaagaagttaacaga

SEQ ID NO: 47867 - DNA, 20 bp, Bacillus firmus
atggcatctcgctatcactt

SEQ ID NO: 47868 - DNA, 20 bp, Leptotrichia buccalis
gcggctcaaccgcaagcctg

SEQ ID NO: 47869 - DNA, 20 bp, Serratia marcescens
aggaggaaggtggtgagctt

SEQ ID NO: 47870 - DNA, 20 bp, Finegoldia magna
aaggcgactttctggacaca

SEQ ID NO: 47871 - DNA, 20 bp, Bacillus coagulans
ataccagatagttttttcct

SEQ ID NO: 47872 - DNA, 20 bp, Streptococcus uberis
aaggggcaaatgcttcacta

SEQ ID NO: 47873 - DNA, 20 bp, Neisseria lactamica
cagcctgactgcttggtagc

SEQ ID NO: 47874 - DNA, 20 bp, Moraxella osloensis
actttaagcagggaggagag

SEQ ID NO: 47875 - DNA, 20 bp, Gemella haemolysans
ctgtgaggacacaagagatt

SEQ ID NO: 47876 - DNA, 20 bp, Peptoniphilus indolicus
agggcttgacataatattga

SEQ ID NO: 47877 - DNA, 20 bp, Eggerthella lenta
gagttcggtagaggcaggcg

SEQ ID NO: 47878 - DNA, 20 bp, Clostridium innocuum
taggtaacctgcccatgtgt

SEQ ID NO: 47879 - DNA, 20 bp, Streptococcus gordonii
ttattgcatgataattaatt

SEQ ID NO: 47880 - DNA, 20 bp, Bacillus sp
cgcatgtggaacgagcggcg

SEQ ID NO: 47881 - DNA, 20 bp, Tetragenococcus halophilus
cacgtggggaacctatccat

SEQ ID NO: 47882 - DNA, 20 bp, Dermabacter hominis
tatgcggggagtcgtcgaag

SEQ ID NO: 47883 - DNA, 20 bp, Helcococcus ovis
agttaaagaatttcggtgaa

SEQ ID NO: 47884 - DNA, 20 bp, Corynebacterium glucuronolyticum
agggacgaagtttttttgac

SEQ ID NO: 47885 - DNA, 20 bp, Prevotella disiens
ttgagtacacacaacgtagg

SEQ ID NO: 47886 - DNA, 20 bp, Kingella kingae
ctttgagaaggaaagcaggg

SEQ ID NO: 47887 - DNA, 20 bp, Leuconostoc lactis
cctaacaccgcatggtgtag

SEQ ID NO: 47888 - DNA, 20 bp, Anaerococcus prevotii
aaagggttcgcaggcggaaa

SEQ ID NO: 47889 - DNA, 20 bp, Achromobacter piechaudii
cgtcatgggctaataccccg

SEQ ID NO: 47890 - DNA, 20 bp, Proteus vulgaris
acggaccaaagcaggggctc

SEQ ID NO: 47891 - DNA, 20 bp, Streptococcus anginosus
gtatgtaacacatgttagat

SEQ ID NO: 47892 - DNA, 20 bp, Arcanobacterium bernardiae
gtttctggatagggatgggc

SEQ ID NO: 47893 - DNA, 20 bp, Leptotrichia buccalis
gacggaaacgactgataata

SEQ ID NO: 47894 - DNA, 20 bp, Facklamia ignava
gagaagggaacttgttcctt

SEQ ID NO: 47895 - DNA, 20 bp, Helcococcus ovis
aagggtacgtaggcggtaat

SEQ ID NO: 47896 - DNA, 20 bp, Streptococcus hyovaginalis
gagtggaaagtttactctgt

SEQ ID NO: 47897 - DNA, 20 bp, Clostridium cadaveris
gatacctctgtgccgccgta

SEQ ID NO: 47898 - DNA, 20 bp, Granulicatella elegans
tgcttgcactggtcaatcta

SEQ ID NO: 47899 - DNA, 20 bp, Lactococcus lactis
acacaagttttaagtttgaa

SEQ ID NO: 47900 - DNA, 20 bp, Acinetobacter calcoaceticus
aggaggctactgaagttaat

SEQ ID NO: 47901 - DNA, 20 bp, Leuconostoc lactis
atgtatctgatagtaactga

SEQ ID NO: 47902 - DNA, 20 bp, Lactococcus lactis
atgcaagttgagcgctgaag

SEQ ID NO: 47903 - DNA, 20 bp, Clostridium glycolicum
tcttatcaaagctccggcgg

SEQ ID NO: 47904 - DNA, 20 bp, Actinomyces bovis
aaagcacagagatgtgtaat

SEQ ID NO: 47905 - DNA, 20 bp, Campylobacter rectus
tcgaacggagattaagtagc

SEQ ID NO: 47906 - DNA, 20 bp, Haemophilus actinemycetemcomitans
gggtttgtgccttagggagc

SEQ ID NO: 47907 - DNA, 20 bp, Brevibacillus reuszeri
agggacgaataagtaccgtt

SEQ ID NO: 47908 - DNA, 20 bp, Prevotella intermedia
cacattctggacgtcgaccg

SEQ ID NO: 47909 - DNA, 20 bp, Cardiobacterium hominis
tgcgcaattgacgttaccta

SEQ ID NO: 47910 - DNA, 20 bp, Enterococcus cecorum
ctacaatggagagtacaacg

SEQ ID NO: 47911 - DNA, 20 bp, Bacteroides fragilis
atgatgtggaaacatgtcag

SEQ ID NO: 47912 - DNA, 20 bp, Bacteroides thetaiotaomicron
atacccgatggtataatcag

SEQ ID NO: 47913 - DNA, 20 bp, Acinetobacter junii
gaggtgcttgcaccttatct

SEQ ID NO: 47914 - DNA, 20 bp, Listeria innocua
cacgctcttgaaagatggtt

SEQ ID NO: 47915 - DNA, 20 bp, Weeksella virosa
tcatttagttttgaaagatt

SEQ ID NO: 47916 - DNA, 20 bp, Gemella haemolysans
ttggttttgctaacactatg

SEQ ID NO: 47917 - DNA, 20 bp, Tetragenococcus halophilus
tgcaagtcgaacgctgctta

SEQ ID NO: 47918 - DNA, 20 bp, Vibrio mimicus
gttgtgacctagagtcgtgg

SEQ ID NO: 47919 - DNA, 20 bp, Actinomyces neuii
ttgagcgaatctcttaaagg

SEQ ID NO: 47920 - DNA, 20 bp, Fusobacterium nucleatum
tgtcccttcggggaaaccta

SEQ ID NO: 47921 - DNA, 20 bp, Alcaligenes faecalis
ccttgacatgtctggaaagc

SEQ ID NO: 47922 - DNA, 20 bp, Tissierella praeacuta
gctttaccttcgggtacagg

SEQ ID NO: 47923 - DNA, 20 bp, Actinomyces naeslundii
gatattctgggtctgtcgca

SEQ ID NO: 47924 - DNA, 20 bp, Facklamia ignava
caaccgtggagttgcattgg

SEQ ID NO: 47925 - DNA, 20 bp, Haemophilus influenzae
gatgtgttaatagcacatca

SEQ ID NO: 47926 - DNA, 20 bp, Arcanobacterium haemolyticum
cgctggcggcgtgcttaaac

SEQ ID NO: 47927 - DNA, 20 bp, Fusobacterium varium
cccaagaagttaacagagat

SEQ ID NO: 47928 - DNA, 20 bp, Weissella paramesenteroides
gagaagaacggcactgagag

SEQ ID NO: 47929 - DNA, 20 bp, Leptotrichia buccalis
agggcatctaggcggccaga

SEQ ID NO: 47930 - DNA, 20 bp, Streptococcus thoraltensis
cttaccaaggcttcgataca

SEQ ID NO: 47931 - DNA, 20 bp, Kocuria kristinae
cagagatggttcttcccttt

SEQ ID NO: 47932 - DNA, 20 bp, Alcaligenes faecalis
agtacttttggcagagaaga

SEQ ID NO: 47933 - DNA, 20 bp, Alicyclobacillus acidocaldarius
ctggggtgtgtccccccaac

SEQ ID NO: 47934 - DNA, 20 bp, Brochothrix campestris
agaacaagggtgagagtaac

SEQ ID NO: 47935 - DNA, 20 bp, Clostridium butyricum
acttcggtggcaggaagaca

SEQ ID NO: 47936 - DNA, 20 bp, Anaerococcus tetradius
tttagaaggccttcgggttg

SEQ ID NO: 47937 - DNA, 20 bp, Tetragenococcus halophilus
ccccagctcaactggggagg

SEQ ID NO: 47938 - DNA, 20 bp, Pseudoramibacter alactolyticus
gacgagcctagagataggaa

SEQ ID NO: 47939 - DNA, 20 bp, Campylobacter rectus
gattaagtagcttgctattt

SEQ ID NO: 47940 - DNA, 20 bp, Fusobacterium varium
aacagagatgttttcgtgcc

SEQ ID NO: 47941 - DNA, 20 bp, Clostridium clostridiiforme
ctgttttgctagagtgtcgg

SEQ ID NO: 47942 - DNA, 20 bp, Haemophilus paraphrophilus
cgcaacaaattgacgttaat

SEQ ID NO: 47943 - DNA, 20 bp, Brevibacillus choshinensis
ccctcctagagataggagct

SEQ ID NO: 47944 - DNA, 20 bp, Anaerococcus tetradius
gcgacgccgcgtgatttaga

SEQ ID NO: 47945 - DNA, 20 bp, Helcococcus kunzii
ctatatgtcttgggctacac

SEQ ID NO: 47946 - DNA, 20 bp, Corynebacterium glucuronolyticum
tgtgtaatccaggggcttaa

SEQ ID NO: 47947 - DNA, 20 bp, Kingella kingae
cgcatacgctttgagaagga

SEQ ID NO: 47948 - DNA, 20 bp, Leptotrichia buccalis
catgtgcccggcaatgaaaa

SEQ ID NO: 47949 - DNA, 20 bp, Facklamia ignava
caaacgcaataaacactccg

SEQ ID NO: 47950 - DNA, 20 bp, Pediococcus dextrinicus
acatctagcgccaatcctag

SEQ ID NO: 47951 - DNA, 20 bp, Weeksella virosa
ggataattgagagcggcgta

SEQ ID NO: 47952 - DNA, 20 bp, Corynebacterium glucuronolyticum
gggcttgacatatgtgagat

SEQ ID NO: 47953 - DNA, 20 bp, Vibrio cholerae
cagtactctagcttgtcagt

SEQ ID NO: 47954 - DNA, 20 bp, Campylobacter rectus
aacaaatcatccagagatgg

SEQ ID NO: 47955 - DNA, 20 bp, Peptoniphilus indolicus
tttgacacggggatagccac

SEQ ID NO: 47956 - DNA, 20 bp, Ochrobactrum intermedium
tgttagccgttggggagttt

SEQ ID NO: 47957 - DNA, 20 bp, Campylobacter rectus
aatcatccagagatggaaga

SEQ ID NO: 47958 - DNA, 20 bp, Veillonella dispar
ggacgaaaggccttcttgcg

SEQ ID NO: 47959 - DNA, 20 bp, Corynebacterium coyleae
tttgtgtaagcccgcagctt

SEQ ID NO: 47960 - DNA, 20 bp, Tissierella praeacuta
cttgacatgcccctgaccgt

SEQ ID NO: 47961 - DNA, 20 bp, Weeksella virosa
gtggcatcatttagttttga

SEQ ID NO: 47962 - DNA, 20 bp, Bacillus oleronius
taacttttttcttcgcatga

SEQ ID NO: 47963 - DNA, 20 bp, Lactococcus lactis
tggaaagctcatcaagtgac

SEQ ID NO: 47964 - DNA, 20 bp, Peptostreptococcus anaerobius
ctgaaaagtttactaataca

SEQ ID NO: 47965 - DNA, 20 bp, Enterococcus saccharolyticus
gagaaagctgaaaggcgctt

SEQ ID NO: 47966 - DNA, 20 bp, Bacillus sp
tggataacttttctctccgc

SEQ ID NO: 47967 - DNA, 20 bp, Listeria monocytogenes
gtggcgcatgccacgctttt

SEQ ID NO: 47968 - DNA, 20 bp, Corynebacterium ulcerans
acaagatcggcgtagagata

SEQ ID NO: 47969 - DNA, 20 bp, Pediococcus acidilactici
acgaagtgagtggcggacgg

SEQ ID NO: 47970 - DNA, 20 bp, Haemophilus segnis
gaaggcatttagtttaatag

SEQ ID NO: 47971 - DNA, 20 bp, Corynebacterium glucuronolyticum
tctaataccctataggaccg

SEQ ID NO: 47972 - DNA, 20 bp, Clostridium clostridiiforme
cgcagtaagcattccacctg

SEQ ID NO: 47973 - DNA, 20 bp, Peptostreptococcus anaerobius
ccgtagttagcctccgaaac

SEQ ID NO: 47974 - DNA, 20 bp, Weissella paramesenteroides
cttaaagtatgtctcagttc

SEQ ID NO: 47975 - DNA, 20 bp, Brochothrix campestris
gctgtcactgtgagatggac

SEQ ID NO: 47976 - DNA, 20 bp, Bacteroides forsythus
gctgtgaggaaggttgggat

SEQ ID NO: 47977 - DNA, 20 bp, Clostridium clostridiiforme
aactgttttgctagagtgtc

SEQ ID NO: 47978 - DNA, 20 bp, Delftia acidovorans
ggaacgaaaaagcttctcct

SEQ ID NO: 47979 - DNA, 20 bp, Streptococcus constellatus
tggtagatgtttaaaaggtg

SEQ ID NO: 47980 - DNA, 20 bp, Campylobacter curvus
tcttggcagtaatgcaccta

SEQ ID NO: 47981 - DNA, 20 bp, Streptococcus porcinus
ggctttctcttcggagcaga

SEQ ID NO: 47982 - DNA, 20 bp, Pseudoramibacter alactolyticus
ggggaagaaaacatgacggt

SEQ ID NO: 47983 - DNA, 20 bp, Facklamia sourekii
taagtgttggggggcttcca

SEQ ID NO: 47984 - DNA, 20 bp, Streptococcus hyovaginalis
catcccagtgaccatcctag

SEQ ID NO: 47985 - DNA, 20 bp, Gemella morbillorum
aagttggttatgctaacact

SEQ ID NO: 47986 - DNA, 20 bp, Bacillus oleronius
tttttcttcgcatgagggag

SEQ ID NO: 47987 - DNA, 20 bp, Comamonas terrigena
ttaataccctggagtcatga

SEQ ID NO: 47988 - DNA, 20 bp, Propionibacterium avidum
cctgtgtgggggtagccgtc

SEQ ID NO: 47989 - DNA, 20 bp, Comamonas testosteroni
ctactagagcggctgatggc

SEQ ID NO: 47990 - DNA, 20 bp, Clostridium limosum
ttgacatcccaagaatcctg

SEQ ID NO: 47991 - DNA, 20 bp, Aerococcus viridans
atagatgaccttgcggtgca

SEQ ID NO: 47992 - DNA, 20 bp, Photobacterium damselae
gttaagggcggcgagcggcg

SEQ ID NO: 47993 - DNA, 20 bp, Leptotrichia buccalis
agacaagtctggggtgaaaa

SEQ ID NO: 47994 - DNA, 20 bp, Arcanobacterium bernardiae
aaggcctttttggttgaggg

SEQ ID NO: 47995 - DNA, 20 bp, Gemella bergeri
acctgaagacggtgacctaa

SEQ ID NO: 47996 - DNA, 20 bp, Campylobacter rectus
cgctagtcgaggcagtaatg

SEQ ID NO: 47997 - DNA, 20 bp, Bacteroides fragilis
aatgattccgcatggtttca

SEQ ID NO: 47998 - DNA, 20 bp, Nocardia asteroides
ggaggttgcttcggtaactg

SEQ ID NO: 47999 - DNA, 20 bp, Facklamia sourekii
tttgacggtatctaatcaga

SEQ ID NO: 48000 - DNA, 20 bp, Bacillus fusiformis
gggcaacctaccttatagtt

SEQ ID NO: 48001 - DNA, 20 bp, Anaerobiospirillum succiniciproducens
tcccttcgggggaaagactt

SEQ ID NO: 48002 - DNA, 20 bp, Eggerthella lenta
agagcgcgtaggcggcctct

SEQ ID NO: 48003 - DNA, 20 bp, Clostridium glycolicum
tgcaagtcgagcgattcact

SEQ ID NO: 48004 - DNA, 20 bp, Alcaligenes faecalis
gcgagagagcttgctctctt

SEQ ID NO: 48005 - DNA, 20 bp, Proteus vulgaris
tagaggttgtggtcttgaac

SEQ ID NO: 48006 - DNA, 20 bp, Bacteroides thetaiotaomicron
taatcagaccgcatggtctt

SEQ ID NO: 48007 - DNA, 20 bp, Acinetobacter haemolyticus
gatactggtcagctagagta

SEQ ID NO: 48008 - DNA, 20 bp, Streptococcus salivarius
aaaggggcaaatgctccact

SEQ ID NO: 48009 - DNA, 20 bp, Bacillus simplex
atacgttcttttctcgcatg

SEQ ID NO: 48010 - DNA, 20 bp, Leptotrichia buccalis
acctgatacaattgccagca

SEQ ID NO: 48011 - DNA, 20 bp, Brochothrix campestris
ttctggagacagaactttcc

SEQ ID NO: 48012 - DNA, 20 bp, Campylobacter rectus
tacataagttaagtcgggaa

SEQ ID NO: 48013 - DNA, 20 bp, Corynebacterium glucuronolyticum
agtttttttgacggtacctg

SEQ ID NO: 48014 - DNA, 20 bp, Veillonella parvula
cgatctaacctcggcatcga

SEQ ID NO: 48015 - DNA, 20 bp, Bacillus alcalophilus
ttcgaataggtcggcacctt

SEQ ID NO: 48016 - DNA, 20 bp, Bacteroides uniformis
gaaggcagctacacggcgac

SEQ ID NO: 48017 - DNA, 20 bp, Peptoniphilus indolicus
tcggggacagtattacaggt

SEQ ID NO: 48018 - DNA, 20 bp, Clostridium clostridiiforme
aagcgcacagggccgcatgg

SEQ ID NO: 48019 - DNA, 20 bp, Veillonella atypica
tatcactgaaggaggggatt

SEQ ID NO: 48020 - DNA, 20 bp, Bacillus sp
aaaacgtattatccggtatt

SEQ ID NO: 48021 - DNA, 20 bp, Vagococcus fluvialis
tgcaagtcgaacgctttgat

SEQ ID NO: 48022 - DNA, 20 bp, Moraxella atlantae
ggtgagtaacatttaggaaa

SEQ ID NO: 48023 - DNA, 20 bp, Bacillus coagulans
aaactgcccggtggaggggg

SEQ ID NO: 48024 - DNA, 20 bp, Fusobacterium mortiferum
tgcgttggaaactgccaaac

SEQ ID NO: 48025 - DNA, 20 bp, Peptostreptococcus anaerobius
tactgaaaagtttactaata

SEQ ID NO: 48026 - DNA, 20 bp, Streptococcus mitis
atgacatttgcttaaaaggt

SEQ ID NO: 48027 - DNA, 20 bp, Bacillus pallidus
tctcgcggctcaaccgcgag

SEQ ID NO: 48028 - DNA, 20 bp, Actinomyces meyeri
aactgtgggttgtggtgagg

SEQ ID NO: 48029 - DNA, 20 bp, Methylobacterium mesophilicum
ttggggtgcttgcaccgcag

SEQ ID NO: 48030 - DNA, 20 bp, Haemophilus paraphrophilus
cgaggaaggttgttgtgtta

SEQ ID NO: 48031 - DNA, 20 bp, Leptotrichia buccalis
aaagggcatctaggcggcca

SEQ ID NO: 48032 - DNA, 20 bp, Peptostreptococcus anaerobius
tatcaaagtgttagcggtat

SEQ ID NO: 48033 - DNA, 20 bp, Brevibacillus choshinensis
gaccaatgaagagcttgctc

SEQ ID NO: 48034 - DNA, 20 bp, Corynebacterium renale
catcgtttagtgtcggtggt

SEQ ID NO: 48035 - DNA, 20 bp, Kocuria kristinae
tacaccggatcgttccagag

SEQ ID NO: 48036 - DNA, 20 bp, Clostridium septicum
gaggtatcaactccttccgt

SEQ ID NO: 48037 - DNA, 20 bp, Peptostreptococcus anaerobius
ctaatacatgataatatata

SEQ ID NO: 48038 - DNA, 20 bp, Haemophilus influenzae
attgaggaaggttgatgtga

SEQ ID NO: 48039 - DNA, 20 bp, Campylobacter curvus
gctgagctagtcttggcagt

SEQ ID NO: 48040 - DNA, 20 bp, Kingella denitrificans
tgttagggaagaaaagggaa

SEQ ID NO: 48041 - DNA, 20 bp, Chromobacterium violaceum
tgggggtttgaatccttggt

SEQ ID NO: 48042 - DNA, 20 bp, Micrococcus luteus
atgttctcgatcgccgtaga

SEQ ID NO: 48043 - DNA, 20 bp, Mannheimia haemolytica
gtgggaccatttggccacct

SEQ ID NO: 48044 - DNA, 20 bp, Pediococcus pentosaceus
aacttccgttaattgattat

SEQ ID NO: 48045 - DNA, 20 bp, Corynebacterium confusum
agacccttccacgggttttg

SEQ ID NO: 48046 - DNA, 20 bp, Corynebacterium xerosis
tttctgacggtagatggaga

SEQ ID NO: 48047 - DNA, 20 bp, Peptoniphilus indolicus
agggttcgcaggcggtttag

SEQ ID NO: 48048 - DNA, 20 bp, Clostridium subterminale
gagctaaacttataaaacca

SEQ ID NO: 48049 - DNA, 20 bp, Brochothrix campestris
gtttcggctgtcactgtgag

SEQ ID NO: 48050 - DNA, 20 bp, Clostridium ramosum
ggatggtgcagagggaagcg

SEQ ID NO: 48051 - DNA, 20 bp, Ignavigranum ruoffiae
tttctggtctgacactgaca

SEQ ID NO: 48052 - DNA, 20 bp, Fusobacterium nucleatum
agacagagatgtttcagtgt

SEQ ID NO: 48053 - DNA, 20 bp, Peptoniphilus asaccharolyticus
ggcaagggctcaacccttgt

SEQ ID NO: 48054 - DNA, 20 bp, Peptostreptococcus anaerobius
aaaagtttactaatacatga

SEQ ID NO: 48055 - DNA, 20 bp, Clostridium clostridiiforme
gtttgacttgagtgcaggag

SEQ ID NO: 48056 - DNA, 20 bp, Haemophilus influenzae
attgaggaaggttgatgtgt

SEQ ID NO: 48057 - DNA, 20 bp, Clostridium paraputrificum
ccatgtaatgtgggaagtcc

SEQ ID NO: 48058 - DNA, 20 bp, Corynebacterium urealyticum
atttttcacgatttccgtgc

SEQ ID NO: 48059 - DNA, 20 bp, Lactococcus raffinolactis
aatacccaaagccggtgagc

SEQ ID NO: 48060 - DNA, 20 bp, Peptostreptococcus anaerobius
ccttagaccggtgtttaatc

SEQ ID NO: 48061 - DNA, 20 bp, Serratia marcescens
ggaggaaggtggtgagctta

SEQ ID NO: 48062 - DNA, 20 bp, Cardiobacterium hominis
ttgcccaagtcagatgtgaa

SEQ ID NO: 48063 - DNA, 20 bp, Enterococcus faecalis
agtcgaacgcttctttcctc

SEQ ID NO: 48064 - DNA, 20 bp, Eggerthella lenta
ggatcccgaactgggaggct

SEQ ID NO: 48065 - DNA, 20 bp, Actinomyces bovis
gagtatgcgcgcaagcgtaa

SEQ ID NO: 48066 - DNA, 20 bp, Streptococcus pyogenes
taatttaaaaggggcaattg

SEQ ID NO: 48067 - DNA, 20 bp, Clostridium innocuum
tgagaactaagtgttggagg

SEQ ID NO: 48068 - DNA, 20 bp, Streptococcus sobrinus
ggagcgcaggcggtttagta

SEQ ID NO: 48069 - DNA, 20 bp, Gemella morbillorum
tcgcgagagtcagccaacct

SEQ ID NO: 48070 - DNA, 20 bp, Anaerococcus tetradius
agccgttggaaacgacgaat

SEQ ID NO: 48071 - DNA, 20 bp, Gemella haemolysans
tggttagacacagatacagg

SEQ ID NO: 48072 - DNA, 20 bp, Campylobacter sputorum
tagctaatctgccccataga

SEQ ID NO: 48073 - DNA, 20 bp, Clostridium sordellii
cttttggaactgtaggactt

SEQ ID NO: 48074 - DNA, 20 bp, Veillonella atypica
gacattgatggacagaacta

SEQ ID NO: 48075 - DNA, 20 bp, Moraxella osloensis
taggtacagagggttgctac

SEQ ID NO: 48076 - DNA, 20 bp, Lactococcus lactis
gatgagcagcgaacgggtga

SEQ ID NO: 48077 - DNA, 20 bp, Bacillus coagulans
ggggctaataccagatagtt

SEQ ID NO: 48078 - DNA, 20 bp, Streptococcus suis
atacttgaaaggagcaattg

SEQ ID NO: 48079 - DNA, 20 bp, Facklamia sourekii
aaatcctacgggacaaggag

SEQ ID NO: 48080 - DNA, 20 bp, Geobacillus thermoglucosidasius
tggagacagggcgttcctcc

SEQ ID NO: 48081 - DNA, 20 bp, Campylobacter lari
tgagtagggaaagtttttcg

SEQ ID NO: 48082 - DNA, 20 bp, Leptotrichia buccalis
cctgcagacagggataacag

SEQ ID NO: 48083 - DNA, 20 bp, Facklamia sourekii
gcagcgaagtcgtgaggcca

SEQ ID NO: 48084 - DNA, 20 bp, Bacillus schlegellii
acctgccctaaagaccggga

SEQ ID NO: 48085 - DNA, 20 bp, Bacillus sp
agcgaactgatgaagagctt

SEQ ID NO: 48086 - DNA, 20 bp, Porphyromonas endodontalis
ctagatttttgcgatatact

SEQ ID NO: 48087 - DNA, 20 bp, Cardiobacterium hominis
ggcgactagagtatgaaaga

SEQ ID NO: 48088 - DNA, 20 bp, Haemophilus ducreyi
tcgaacggtagcacgaaggg

SEQ ID NO: 48089 - DNA, 20 bp, Rothia dentocariosa
atcgcgtcagagatggcgtt

SEQ ID NO: 48090 - DNA, 20 bp, Bacteroides thetaiotaomicron
agctcactggactgcaactg

SEQ ID NO: 48091 - DNA, 20 bp, Prevotella melaninogenica
agctgacgggagcgcaactg

SEQ ID NO: 48092 - DNA, 20 bp, Campylobacter lari
aaccgttgaactgcttggga

SEQ ID NO: 48093 - DNA, 20 bp, Acinetobacter haemolyticus
aggctactctagttaatacc

SEQ ID NO: 48094 - DNA, 20 bp, Campylobacter rectus
gtgtaggatgaggctatatc

SEQ ID NO: 48095 - DNA, 20 bp, Anaerococcus tetradius
gttgtaaaaatcttttgtat

SEQ ID NO: 48096 - DNA, 20 bp, Clostridium ramosum
gcgacgatctggcctgcaac

SEQ ID NO: 48097 - DNA, 20 bp, Aerococcus christensenii
acttatcgatggccttgcgg

SEQ ID NO: 48098 - DNA, 20 bp, Vibrio cholerae
attaacttaaccaccttcct

SEQ ID NO: 48099 - DNA, 20 bp, Anaerococcus prevotii
aagctccggcggtctaagat

SEQ ID NO: 48100 - DNA, 20 bp, Moraxella lacunata
taatacccacaagccctgac

SEQ ID NO: 48101 - DNA, 20 bp, Corynebacterium cystitidis
aacttcgggagtgcaggcga

SEQ ID NO: 48102 - DNA, 20 bp, Prevotella bivia
aaatgtaggagctcaacttc

SEQ ID NO: 48103 - DNA, 20 bp, Moraxella osloensis
ggtggtgctagaatatgtga

SEQ ID NO: 48104 - DNA, 20 bp, Fusobacterium nucleatum
atattatgattttagggcat

SEQ ID NO: 48105 - DNA, 20 bp, Delftia acidovorans
atacgagaggcccatgacgg

SEQ ID NO: 48106 - DNA, 20 bp, Bacillus smithii
gggccccgcggcgcattagc

SEQ ID NO: 48107 - DNA, 20 bp, Streptococcus thoraltensis
gagctggtgacagtaagcta

SEQ ID NO: 48108 - DNA, 20 bp, Bacteroides fragilis
cagttgatactgtcagtctt

SEQ ID NO: 48109 - DNA, 20 bp, Weeksella virosa
gcgtttaaagacggggactc

SEQ ID NO: 48110 - DNA, 20 bp, Peptostreptococcus anaerobius
ttagcggtataggatggacc

SEQ ID NO: 48111 - DNA, 20 bp, Vibrio cholerae
cccctctaccgggcaatttc

SEQ ID NO: 48112 - DNA, 20 bp, Chromobacterium violaceum
agtttcaccagaagtgggta

SEQ ID NO: 48113 - DNA, 20 bp, Tetragenococcus halophilus
agaaagctcaaaggcgcttt

SEQ ID NO: 48114 - DNA, 20 bp, Staphylococcus capitis
gcagcttgctgcgggtactc

SEQ ID NO: 48115 - DNA, 20 bp, Corynebacterium amycolatum
atcgcgccagagatggtgtt

SEQ ID NO: 48116 - DNA, 20 bp, Bacteroides fragilis
gtgaccgtatgctaatccca

SEQ ID NO: 48117 - DNA, 20 bp, Oligella ureolytica
ccatcccgcgtgtgggacga

SEQ ID NO: 48118 - DNA, 20 bp, Alicyclobacillus acidocaldarius
tgccgctctccccgagcaac

SEQ ID NO: 48119 - DNA, 20 bp, Bacillus licheniformis
ttgctcccttaggtcagcgg

SEQ ID NO: 48120 - DNA, 20 bp, Dermabacter hominis
tgtggttttctttggactgg

SEQ ID NO: 48121 - DNA, 20 bp, Anaerococcus prevotii
agggttcgcaggcggaaatg

SEQ ID NO: 48122 - DNA, 20 bp, Vibrio hollisae
gctattcgagcggccgacgt

SEQ ID NO: 48123 - DNA, 20 bp, Bacteroides thetaiotaomicron
gaattttgtatgtaccatat

SEQ ID NO: 48124 - DNA, 20 bp, Corynebacterium hoagii
ggcgggggttggaaaggttt

SEQ ID NO: 48125 - DNA, 20 bp, Campylobacter rectus
cttgggaaagaattatgacg

SEQ ID NO: 48126 - DNA, 20 bp, Anaerococcus prevotii
gtaggataggtgactggggt

SEQ ID NO: 48127 - DNA, 20 bp, Bacillus pallidus
taaggtgactgccggctaaa

SEQ ID NO: 48128 - DNA, 20 bp, Helcococcus kunzii
caatggtctgaacaaagcgc

SEQ ID NO: 48129 - DNA, 20 bp, Brevibacterium epidermidis
ggcgaacccgtgagggtaag

SEQ ID NO: 48130 - DNA, 20 bp, Streptococcus hyovaginalis
aaagtttactctgtgacggt

SEQ ID NO: 48131 - DNA, 20 bp, Brevibacillus agri
gatctgaaaagaaaagatgg

SEQ ID NO: 48132 - DNA, 20 bp, Brevibacillus parabrevis
ttggattgcatgatccgaaa

SEQ ID NO: 48133 - DNA, 20 bp, Nocardia asteroides
ctcgcgagaggatgctaatc

SEQ ID NO: 48134 - DNA, 20 bp, Corynebacterium afermentans
ttccagacgtttcctctata

SEQ ID NO: 48135 - DNA, 20 bp, Fusobacterium nucleatum
tcaatagtgaaaggcggctt

SEQ ID NO: 48136 - DNA, 20 bp, Actinomyces viscosus
aaggtttgttccggtggggg

SEQ ID NO: 48137 - DNA, 20 bp, Streptococcus parauberis
taataccgcatgacaattaa

SEQ ID NO: 48138 - DNA, 20 bp, Pseudomonas luteola
tccaaaactgcctggctaga

SEQ ID NO: 48139 - DNA, 20 bp, Streptococcus infantarius
catttaacccatgttagatg

SEQ ID NO: 48140 - DNA, 20 bp, Veillonella atypica
ctatcaatcttagtggcgaa

SEQ ID NO: 48141 - DNA, 20 bp, Anaerobiospirillum succiniciproducens
cttgtcctttgttgccaaca

SEQ ID NO: 48142 - DNA, 20 bp, Bacteroides stercoris
gattattaaagaatttcggt

SEQ ID NO: 48143 - DNA, 20 bp, Cellulomonas turbata
cccctgcatggggagtgtct

SEQ ID NO: 48144 - DNA, 20 bp, Leptotrichia buccalis
gacaagtctggggtgaaaac

SEQ ID NO: 48145 - DNA, 20 bp, Clostridium innocuum
acgtactacaatggcgacca

SEQ ID NO: 48146 - DNA, 20 bp, Streptococcus thermophilus
ggtgcttgcaccgagcggat

SEQ ID NO: 48147 - DNA, 20 bp, Leuconostoc lactis
catggtgtagggttgaaaga

SEQ ID NO: 48148 - DNA, 20 bp, Clostridium glycolicum
ttaagtcaggagtgaaaggc

SEQ ID NO: 48149 - DNA, 20 bp, Paenibacillus thiaminolyticus
ttaagactgggataactcac

SEQ ID NO: 48150 - DNA, 20 bp, Bacillus badius
actgtccgtaccttgacggt

SEQ ID NO: 48151 - DNA, 20 bp, Peptostreptococcus anaerobius
catggataacatactgaaaa

SEQ ID NO: 48152 - DNA, 20 bp, Anaerococcus prevotii
ggaataattcggtgccgcag

SEQ ID NO: 48153 - DNA, 20 bp, Cardiobacterium hominis
cgggttgttaaagactcggt

SEQ ID NO: 48154 - DNA, 20 bp, Eubacterium moniliforme
cttgacatcttctgcattac

SEQ ID NO: 48155 - DNA, 20 bp, Bacillus circulans
aagctgaaagacggtttacg

SEQ ID NO: 48156 - DNA, 20 bp, Pseudomonas luteola
ctgggaggaagggttgtaac

SEQ ID NO: 48157 - DNA, 20 bp, Acinetobacter johnsonii
cttgctacctaacctagcgg

SEQ ID NO: 48158 - DNA, 20 bp, Staphylococcus carnosus
tatgcgcaccttgacggtac

SEQ ID NO: 48159 - DNA, 20 bp, Staphylococcus felis
gccggataatatgttgaacc

SEQ ID NO: 48160 - DNA, 20 bp, Kingella kingae
tacgctttgagaaggaaagc

SEQ ID NO: 48161 - DNA, 20 bp, Peptoniphilus indolicus
ggtcggaacaaagagcgggc

SEQ ID NO: 48162 - DNA, 20 bp, Propionibacterium freudenreichii
agctttatgcggtcagggat

SEQ ID NO: 48163 - DNA, 20 bp, Streptococcus thermophilus
tttccgggattcagtgccgc

SEQ ID NO: 48164 - DNA, 20 bp, Eubacterium moniliforme
cggggaagttccttcgggaa

SEQ ID NO: 48165 - DNA, 20 bp, Campylobacter rectus
cgaggcagtaatgcacctaa

SEQ ID NO: 48166 - DNA, 20 bp, Bacteroides merdae
tgtaccctatgaataagcat

SEQ ID NO: 48167 - DNA, 20 bp, Facklamia ignava
gttatcagagaagaatagcc

SEQ ID NO: 48168 - DNA, 20 bp, Actinomyces odontolyticus
actgcagagatgtggtggca

SEQ ID NO: 48169 - DNA, 20 bp, Kingella kingae
agggaagaaaaggttgatgc

SEQ ID NO: 48170 - DNA, 20 bp, Actinomyces odontolyticus
agagatgtggtggcatttag

SEQ ID NO: 48171 - DNA, 20 bp, Neisseria flavescens
gacagctgatgacggtacct

SEQ ID NO: 48172 - DNA, 20 bp, Acinetobacter haemolyticus
tactggtcagctagagtatg

SEQ ID NO: 48173 - DNA, 20 bp, Kocuria kristinae
catacaccggatcgttccag

SEQ ID NO: 48174 - DNA, 20 bp, Bacillus schlegellii
taacaccgggaaaccgggct

SEQ ID NO: 48175 - DNA, 20 bp, Comamonas terrigena
taccctggagtcatgacggt

SEQ ID NO: 48176 - DNA, 20 bp, Actinomyces bovis
atagttatggcggatacagg

SEQ ID NO: 48177 - DNA, 20 bp, Alicyclobacillus acidocaldarius
tccagcactcaagtcaagca

SEQ ID NO: 48178 - DNA, 20 bp, Serratia marcescens
gtgagcttaatacgctcatc

SEQ ID NO: 48179 - DNA, 20 bp, Tissierella praeacuta
gaaaggcttgagttaaggag

SEQ ID NO: 48180 - DNA, 20 bp, Bacteroides stercoris
tcggacagttgtgaaggtgc

SEQ ID NO: 48181 - DNA, 20 bp, Campylobacter lari
caagttgagtagggaaagtt

SEQ ID NO: 48182 - DNA, 20 bp, Prevotella intermedia
ggcggtctgttaagcgtgtt

SEQ ID NO: 48183 - DNA, 20 bp, Corynebacterium afermentans
ctgaccatgcggtcgcagct

SEQ ID NO: 48184 - DNA, 20 bp, Prevotella melaninogenica
ctgacttgcagcgcatactg

SEQ ID NO: 48185 - DNA, 20 bp, Prevotella oris
gcggggataaagtgagggac

SEQ ID NO: 48186 - DNA, 20 bp, Micrococcus luteus
accggataggagcgcccacc

SEQ ID NO: 48187 - DNA, 20 bp, Leptotrichia buccalis
ggctcaaccgcaagcctgcc

SEQ ID NO: 48188 - DNA, 20 bp, Peptoniphilus indolicus
acagtattacaggtggtgca

SEQ ID NO: 48189 - DNA, 20 bp, Streptococcus thoraltensis
agctggtgacagtaagctaa

SEQ ID NO: 48190 - DNA, 20 bp, Bordetella bronchiseptica
cggcacgggctaatatcctg

SEQ ID NO: 48191 - DNA, 20 bp, Eikenella corrodens
gctaataccactttttgctg

SEQ ID NO: 48192 - DNA, 20 bp, Anaerococcus tetradius
gagactgcgaagttaagcaa

SEQ ID NO: 48193 - DNA, 20 bp, Acinetobacter radioresistens
tttaggatagtggacgttac

SEQ ID NO: 48194 - DNA, 20 bp, Streptococcus equi
gtaacctagcttatagcggg

SEQ ID NO: 48195 - DNA, 20 bp, Aerococcus viridans
gtcgagcgaacagatgaagt

SEQ ID NO: 48196 - DNA, 20 bp, Prevotella melaninogenica
ttactgtgggataacctgcc

SEQ ID NO: 48197 - DNA, 20 bp, Prevotella bivia
tttatcggttatggatgggg

SEQ ID NO: 48198 - DNA, 20 bp, Anaerococcus prevotii
ggatggggactctaaagaga

SEQ ID NO: 48199 - DNA, 20 bp, Tissierella praeacuta
gacacttaaatgtcgcatga

SEQ ID NO: 48200 - DNA, 20 bp, Pasteurella trehalosi
attgcatttcagactggctg

SEQ ID NO: 48201 - DNA, 20 bp, Aerococcus viridans
aagattgaaagacggctctg

SEQ ID NO: 48202 - DNA, 20 bp, Bacteroides thetaiotaomicron
tccattaggcagttggtgag

SEQ ID NO: 48203 - DNA, 20 bp, Clostridium ramosum
tagctaagaccgcataggta

SEQ ID NO: 48204 - DNA, 20 bp, Cardiobacterium hominis
gcggttgcccaagtcagatg

SEQ ID NO: 48205 - DNA, 20 bp, Clostridium clostridiiforme
aggcggggcaggtaactggg

SEQ ID NO: 48206 - DNA, 20 bp, Bacteroides thetaiotaomicron
acccgggcttaaattgcaaa

SEQ ID NO: 48207 - DNA, 20 bp, Campylobacter concisus
aaggcccaagcttgcttggg

SEQ ID NO: 48208 - DNA, 20 bp, Salmonella enteritidis
gacatccacagaagaatcca

SEQ ID NO: 48209 - DNA, 20 bp, Vibrio cholerae
ccccctctaccgggcaattt

SEQ ID NO: 48210 - DNA, 20 bp, Anaerobiospirillum succiniciproducens
cgtgaggtggagtggaaccc

SEQ ID NO: 48211 - DNA, 20 bp, Atopobium parvulum
ctaaccttttaggagggaga

SEQ ID NO: 48212 - DNA, 20 bp, Bacteroides uniformis
attgcaactgaatgatgtgg

SEQ ID NO: 48213 - DNA, 20 bp, Gemella haemolysans
agtagagacggtacctaacc

SEQ ID NO: 48214 - DNA, 20 bp, Bacteroides fragilis
gaatgatgtggaaacatgtc

SEQ ID NO: 48215 - DNA, 20 bp, Lactococcus lactis
acataagttttaagtttgaa

SEQ ID NO: 48216 - DNA, 20 bp, Helcococcus kunzii
tgaacaaagcgcagctacct

SEQ ID NO: 48217 - DNA, 20 bp, Anaerococcus prevotii
actgggctcattctgacgct

SEQ ID NO: 48218 - DNA, 20 bp, Brevibacillus choshinensis
tgatccgaaaagaaaaggcg

SEQ ID NO: 48219 - DNA, 20 bp, Streptococcus equi
tgctattcttagagataaga

SEQ ID NO: 48220 - DNA, 20 bp, Vibrio hollisae
agtggaatccgccagaagtg

SEQ ID NO: 48221 - DNA, 20 bp, Aneurinibacillus aneurinilyticus
tccctcctagagataggagc

SEQ ID NO: 48222 - DNA, 20 bp, Bacteroides forsythus
cttactaaggtataactgac

SEQ ID NO: 48223 - DNA, 20 bp, Helcococcus kunzii
caaagcgcagctacctcgtg

SEQ ID NO: 48224 - DNA, 20 bp, Bacillus azotoformans
agctaataccggataactct

SEQ ID NO: 48225 - DNA, 20 bp, Bacillus sp
tggagagagattgaaagatg

SEQ ID NO: 48226 - DNA, 20 bp, Campylobacter curvus
taagggacaacagttggaaa

SEQ ID NO: 48227 - DNA, 20 bp, Proteus vulgaris
ctttgtcaattgacgttacc

SEQ ID NO: 48228 - DNA, 20 bp, Aerococcus christensenii
gctatcacttatcgatggcc

SEQ ID NO: 48229 - DNA, 20 bp, Bacteroides capilosus
gtgggttcgataattggggt

SEQ ID NO: 48230 - DNA, 20 bp, Bacteroides capilosus
atcggaattccgtgtgtagc

SEQ ID NO: 48231 - DNA, 20 bp, Corynebacterium coyleae
tacaacgcgtttgcgagcct

SEQ ID NO: 48232 - DNA, 20 bp, Bacteroides capilosus
aggcgggactgcaagtcagg

SEQ ID NO: 48233 - DNA, 20 bp, Shewanella algae
tgatggataagcccaggtgg

SEQ ID NO: 48234 - DNA, 20 bp, Pasteurella aerogenes
tagtgtcgagagacgaaaga

SEQ ID NO: 48235 - DNA, 20 bp, Haemophilus segnis
atagactaggtgattgacgt

SEQ ID NO: 48236 - DNA, 20 bp, Capnocytophaga ochracea
cgagtaaggtcgagccctct

SEQ ID NO: 48237 - DNA, 20 bp, Streptococcus suis
agatacttgaaaggagcaat

SEQ ID NO: 48238 - DNA, 20 bp, Corynebacterium group F
tcgcacaaagccggccttag

SEQ ID NO: 48239 - DNA, 20 bp, Acinetobacter junii
gaggctactgagactaatac

SEQ ID NO: 48240 - DNA, 20 bp, Helcococcus kunzii
gaagcaagccctggctaaat

SEQ ID NO: 48241 - DNA, 20 bp, Streptococcus equi
cccatgttaaccatttaaaa

SEQ ID NO: 48242 - DNA, 20 bp, Lactobacillus casei
gttggagaagaatggtcggc

SEQ ID NO: 48243 - DNA, 20 bp, Nocardia asteroides
ggggaggttgcttcggtaac

SEQ ID NO: 48244 - DNA, 20 bp, Leptotrichia buccalis
gaggtggacggaactgcacg

SEQ ID NO: 48245 - DNA, 20 bp, Leuconostoc lactis
ttgataaacatttgagtgag

SEQ ID NO: 48246 - DNA, 20 bp, Granulicatella elegans
aggcttcggcttctgctgat

SEQ ID NO: 48247 - DNA, 20 bp, Streptococcus bovis
cgctgactactttagcttgc

SEQ ID NO: 48248 - DNA, 20 bp, Brochothrix campestris
aacatcataagatgttcaag

SEQ ID NO: 48249 - DNA, 20 bp, Ralstonia paucula
ctaatacctggggtagatga

SEQ ID NO: 48250 - DNA, 20 bp, Bacillus coagulans
cggacctcacgccaccggat

SEQ ID NO: 48251 - DNA, 20 bp, Streptococcus sobrinus
gtttttcttcggaacatcgg

SEQ ID NO: 48252 - DNA, 20 bp, Neisseria meningitidis
ttgagagagaaagcagggga

SEQ ID NO: 48253 - DNA, 20 bp, Ochrobactrum intermedium
gttagccgttggggagttta

SEQ ID NO: 48254 - DNA, 20 bp, Streptococcus porcinus
aaggggcaactgctccacta

SEQ ID NO: 48255 - DNA, 20 bp, Enterobacter sakazakii
ctggtcagcttgagtctcgt

SEQ ID NO: 48256 - DNA, 20 bp, Fusobacterium varium
ccaagaagttaacagagatg

SEQ ID NO: 48257 - DNA, 20 bp, Streptococcus suis
ataggatttttcttcggaac

SEQ ID NO: 48258 - DNA, 20 bp, Staphylococcus muscae
cagacgaggtgcttgcacct

SEQ ID NO: 48259 - DNA, 20 bp, Streptococcus constellatus
ttgttaaggaagaacgtgtg

SEQ ID NO: 48260 - DNA, 20 bp, Gemella haemolysans
aagtgttggtctcataagag

SEQ ID NO: 48261 - DNA, 20 bp, Arcanobacterium bernardiae
tcctttcagtacagaacaag

SEQ ID NO: 48262 - DNA, 20 bp, Peptoniphilus indolicus
tcccttcggggacagtatta

SEQ ID NO: 48263 - DNA, 20 bp, Sporosarcina pasteurii
acatcccgctgaccggtata

SEQ ID NO: 48264 - DNA, 20 bp, Photobacterium damselae
cagcgacttaactgaacctt

SEQ ID NO: 48265 - DNA, 20 bp, Bacteroides capilosus
ctgtagttcttgagtgctgg

SEQ ID NO: 48266 - DNA, 20 bp, Clostridium septicum
agtcgagcgaggggagtttc

SEQ ID NO: 48267 - DNA, 20 bp, Clostridium barati
cttgacatcctctgcattac

SEQ ID NO: 48268 - DNA, 20 bp, Empedobacter brevis
gaaggtaccagaagaataag

SEQ ID NO: 48269 - DNA, 20 bp, Atopobium parvulum
aagtcgaacgattaaagcac

SEQ ID NO: 48270 - DNA, 20 bp, Clostridium sordellii
gaactgtaggacttgagtgc

SEQ ID NO: 48271 - DNA, 20 bp, Tissierella praeacuta
cttagcgataagatgctaat

SEQ ID NO: 48272 - DNA, 20 bp, Streptococcus hyovaginalis
taacacatgttaatgattta

SEQ ID NO: 48273 - DNA, 20 bp, Pseudomonas luteola
ggaagggttgtaacctaata

SEQ ID NO: 48274 - DNA, 20 bp, Bacteroides fragilis
ataatgattccgcatggttt

SEQ ID NO: 48275 - DNA, 20 bp, Eschericchia vulneris
tggaactgagtacacggtcc

SEQ ID NO: 48276 - DNA, 20 bp, Moraxella atlantae
gtcctacgggagaaaggagc

SEQ ID NO: 48277 - DNA, 20 bp, Facklamia ignava
tggaatgggaaagacggctt

SEQ ID NO: 48278 - DNA, 20 bp, Streptococcus porcinus
taggctttctcttcggagca

SEQ ID NO: 48279 - DNA, 20 bp, Prevotella oris
tgcggggataaagtgaggga

SEQ ID NO: 48280 - DNA, 20 bp, Cardiobacterium hominis
catgggaatctgccttttgc

SEQ ID NO: 48281 - DNA, 20 bp, Brevibacillus brevis
atgaggaaaagctgaaagtc

SEQ ID NO: 48282 - DNA, 20 bp, Gemella haemolysans
gataacagcattaactgcat

SEQ ID NO: 48283 - DNA, 20 bp, Leuconostoc argentinum
tagggaatgattctagttcg

SEQ ID NO: 48284 - DNA, 20 bp, Acinetobacter haemolyticus
actctagttaatacctagag

SEQ ID NO: 48285 - DNA, 20 bp, Brochothrix campestris
gtaacacccaaagccggttt

SEQ ID NO: 48286 - DNA, 20 bp, Alicyclobacillus acidocaldarius
cctcaacgcgctggtaacac

SEQ ID NO: 48287 - DNA, 20 bp, Arcanobacterium bernardiae
gatggtgcagccttcggggt

SEQ ID NO: 48288 - DNA, 20 bp, Anaerobiospirillum succiniciproducens
gcggtctcctgggcaaatac

SEQ ID NO: 48289 - DNA, 20 bp, Clostridium limosum
tttcaatacttcggtgccgc

SEQ ID NO: 48290 - DNA, 20 bp, Streptococcus canis
tggaaaacccattatgtgac

SEQ ID NO: 48291 - DNA, 20 bp, Bacteroides capilosus
agttcttgagtgctggagag

SEQ ID NO: 48292 - DNA, 20 bp, Veillonella dispar
cggcatcgaggatagatgaa

SEQ ID NO: 48293 - DNA, 20 bp, Leuconostoc pseudomesenteroides
agttaaaaggcgctttggcg

SEQ ID NO: 48294 - DNA, 20 bp, Anaerococcus prevotii
aatcttgacagaacccttcg

SEQ ID NO: 48295 - DNA, 20 bp, Bacteroides distasonis
agtccgtaaccgaaaggatc

SEQ ID NO: 48296 - DNA, 20 bp, Helcococcus ovis
agattaaagaaggaaagtag

SEQ ID NO: 48297 - DNA, 20 bp, Staphylococcus carnosus
gcaatgaaagacggttttgc

SEQ ID NO: 48298 - DNA, 20 bp, Facklamia ignava
gtttgacggtaactgatcag

SEQ ID NO: 48299 - DNA, 20 bp, Arcanobacterium haemolyticum
tccggggctgcagtgggtac

SEQ ID NO: 48300 - DNA, 20 bp, Moraxella atlantae
gtaacatttaggaaactgcc

SEQ ID NO: 48301 - DNA, 20 bp, Peptoniphilus indolicus
aagtgaattagcggtcaaag

SEQ ID NO: 48302 - DNA, 20 bp, Bacillus alcalophilus
ataatcaaaggaatcacatg

SEQ ID NO: 48303 - DNA, 20 bp, Helcococcus ovis
gtgctagttgtcgggagtca

SEQ ID NO: 48304 - DNA, 20 bp, Streptococcus pyogenes
agaactggtgcttgcaccgg

SEQ ID NO: 48305 - DNA, 20 bp, Neisseria polysaccharea
ggataaccgcaaggggtccg

SEQ ID NO: 48306 - DNA, 20 bp, Lactococcus lactis
tcaagtgacggtaactaccc

SEQ ID NO: 48307 - DNA, 20 bp, Moraxella osloensis
agcagggaggagaggctaat

SEQ ID NO: 48308 - DNA, 20 bp, Morganella morganii
cgcgccatcagatgaaccca

SEQ ID NO: 48309 - DNA, 20 bp, Helcococcus ovis
tagttgtcgggagtcaaatc

SEQ ID NO: 48310 - DNA, 20 bp, Tetragenococcus halophilus
acctgaaagaaagctcaaag

SEQ ID NO: 48311 - DNA, 20 bp, Lactococcus lactis
ggagttgggagtacccgaag

SEQ ID NO: 48312 - DNA, 20 bp, Lactococcus lactis
gagctataagttctctgtat

SEQ ID NO: 48313 - DNA, 20 bp, Budvicia aquatica
gtgggcatgacccgtggctt

SEQ ID NO: 48314 - DNA, 20 bp, Streptococcus dysgalactiae
agagaagaatgatggtggga

SEQ ID NO: 48315 - DNA, 20 bp, Haemophilus haemolyticus
tccatggaattctgtagaga

SEQ ID NO: 48316 - DNA, 20 bp, Acinetobacter junii
aggtgcttgcaccttatctt

SEQ ID NO: 48317 - DNA, 20 bp, Corynebacterium accolens
agggtctttctacgactttc

SEQ ID NO: 48318 - DNA, 20 bp, Finegoldia magna
aacctgcctatgacagtggg

SEQ ID NO: 48319 - DNA, 20 bp, Bacillus smithii
taatcccaaaaaaccattct

SEQ ID NO: 48320 - DNA, 20 bp, Alicyclobacillus acidocaldarius
ttcgcctccctttgttccgc

SEQ ID NO: 48321 - DNA, 20 bp, Clostridium glycolicum
ggtaacctgcctcatacaca

SEQ ID NO: 48322 - DNA, 20 bp, Bacillus lentus
ccgctaaccaacaaaaagca

SEQ ID NO: 48323 - DNA, 20 bp, Chromobacterium violaceum
ggggatgacagtacctgaag

SEQ ID NO: 48324 - DNA, 20 bp, Clostridium cadaveris
ggggtttcgatacctctgtg

SEQ ID NO: 48325 - DNA, 20 bp, Burkholderia multivorans
ctaatacagtcgggggatga

SEQ ID NO: 48326 - DNA, 20 bp, Bacillus flexus
gagcgaactgattagaagct

SEQ ID NO: 48327 - DNA, 20 bp, Campylobacter lari
actgttaaactgcttgagaa

SEQ ID NO: 48328 - DNA, 20 bp, Alicyclobacillus acidocaldarius
ggcctgaaaggcagattacc

SEQ ID NO: 48329 - DNA, 20 bp, Bacteroides capilosus
cttattgttagttgctacgc

SEQ ID NO: 48330 - DNA, 20 bp, Bacteroides fragilis
ctttactcggggatagcctt

SEQ ID NO: 48331 - DNA, 20 bp, Neisseria flavescens
gctgttgctaatatcgacag

SEQ ID NO: 48332 - DNA, 20 bp, Clostridium sordellii
caagccagaagtgaaaggct

SEQ ID NO: 48333 - DNA, 20 bp, Fusobacterium nucleatum
tagtgaaaggcggctttgct

SEQ ID NO: 48334 - DNA, 20 bp, Eggerthella lenta
ccgaactgggaggctcgagt

SEQ ID NO: 48335 - DNA, 20 bp, Neisseria subflava
ctgattgcttggtagcgtag

SEQ ID NO: 48336 - DNA, 20 bp, Facklamia ignava
actaataccgcatagttgtt

SEQ ID NO: 48337 - DNA, 20 bp, Corynebacterium accolens
gagtagatgttgcatgacat

SEQ ID NO: 48338 - DNA, 20 bp, Tissierella praeacuta
tgcccctgaccgtcctagag

SEQ ID NO: 48339 - DNA, 20 bp, Listeria monocytogenes
gctaataccgaatgataaag

SEQ ID NO: 48340 - DNA, 20 bp, Bacteroides merdae
ggcatggacaaagggcagct

SEQ ID NO: 48341 - DNA, 20 bp, Clostridium botulinum
ttgtaaagccctgttttcta

SEQ ID NO: 48342 - DNA, 20 bp, Streptococcus cristatus
taataccgcataatattgac

SEQ ID NO: 48343 - DNA, 19 bp, Paenibacillus alvei
aagtcgtaacaaggcagcc

SEQ ID NO: 48344 - DNA, 20 bp, Peptostreptococcus anaerobius
gtaacctgccctatacacat

SEQ ID NO: 48345 - DNA, 20 bp, Streptococcus ratti
gcataatattaattattgca

SEQ ID NO: 48346 - DNA, 20 bp, Bacillus smithii
gcggcgcaagctgccgcttg

SEQ ID NO: 48347 - DNA, 20 bp, Neisseria meningitidis
tacgtcttgagagagaaagc

SEQ ID NO: 48348 - DNA, 20 bp, Granulicatella adiacens
atccggaaacggatgctaaa

SEQ ID NO: 48349 - DNA, 20 bp, Haemophilus ducreyi
gaaggcagttttgttaatag

SEQ ID NO: 48350 - DNA, 20 bp, Bacillus halodurans
gcggaccaaagggagcttgc

SEQ ID NO: 48351 - DNA, 20 bp, Anaerococcus prevotii
ccataagaaaaagccccggc

SEQ ID NO: 48352 - DNA, 20 bp, Proteus penneri
tacctttatcaattgacgtt

SEQ ID NO: 48353 - DNA, 20 bp, Bacillus schlegellii
aacctgccctaaagaccggg

SEQ ID NO: 48354 - DNA, 20 bp, Clostridium glycolicum
tcgagcgattcacttcggtg

SEQ ID NO: 48355 - DNA, 20 bp, Corynebacterium kutscheri
gctagagatagtttttcctt

SEQ ID NO: 48356 - DNA, 20 bp, Chromobacterium violaceum
aatcccgctggttaataccc

SEQ ID NO: 48357 - DNA, 20 bp, Facklamia ignava
tttgatgcatagccgacctg

SEQ ID NO: 48358 - DNA, 20 bp, Tetragenococcus halophilus
ttcacctgaaagaaagctca

SEQ ID NO: 48359 - DNA, 20 bp, Streptococcus thermophilus
ggggcaattgctccactaca

SEQ ID NO: 48360 - DNA, 20 bp, Bacillus schlegellii
aagtctgctgtgaaaggcca

SEQ ID NO: 48361 - DNA, 20 bp, Bacteroides merdae
ccttacccgggtttgaacgt

SEQ ID NO: 48362 - DNA, 20 bp, Corynebacterium group F
ggatattgttgtggaaagct

SEQ ID NO: 48363 - DNA, 20 bp, Proteus mirabilis
aggtgataaggttaataccc

SEQ ID NO: 48364 - DNA, 20 bp, Eggerthella lenta
ggctcaacccccggccggat

SEQ ID NO: 48365 - DNA, 20 bp, Corynebacterium jeikeium
ctaggtgtgggggttttatt

SEQ ID NO: 48366 - DNA, 20 bp, Streptococcus dysgalactiae
acatcctcctgaccggtcta

SEQ ID NO: 48367 - DNA, 20 bp, Clostridium clostridiiforme
gctgccgaaggcggggcagg

SEQ ID NO: 48368 - DNA, 20 bp, Clostridium innocuum
gtcgcctggtctgtaactga

SEQ ID NO: 48369 - DNA, 20 bp, Peptostreptococcus anaerobius
cgcaaggaggaagtcgtcga

SEQ ID NO: 48370 - DNA, 20 bp, Paenibacillus thiaminolyticus
actgttccataggtgacggt

SEQ ID NO: 48371 - DNA, 20 bp, Brevibacillus choshinensis
agataggagctctcttcgga

SEQ ID NO: 48372 - DNA, 20 bp, Peptoniphilus indolicus
tcggaacaaagagcgggcaa

SEQ ID NO: 48373 - DNA, 20 bp, Tetragenococcus halophilus
cccagctcaactggggaggg

SEQ ID NO: 48374 - DNA, 20 bp, Haemophilus parainfluenzae
atgattgacgttaactacag

SEQ ID NO: 48375 - DNA, 20 bp, Streptococcus canis
actagtctaaggagttgcga

SEQ ID NO: 48376 - DNA, 20 bp, Budvicia aquatica
tgtgggcatgacccgtggct

SEQ ID NO: 48377 - DNA, 20 bp, Alicyclobacillus acidocaldarius
ccaaagccatcccatggttg

SEQ ID NO: 48378 - DNA, 20 bp, Microbacterium hominis
catggtcagtagctggaaag

SEQ ID NO: 48379 - DNA, 20 bp, Tissierella praeacuta
ctacttagcgataagatgct

SEQ ID NO: 48380 - DNA, 20 bp, Shewanella algae
ttaataccttacatctgtga

SEQ ID NO: 48381 - DNA, 20 bp, Stenotrophomonas maltophilia
ctggctaatacccggttggg

SEQ ID NO: 48382 - DNA, 20 bp, Listeria welshimeri
tggcgcatgccacggctttg

SEQ ID NO: 48383 - DNA, 20 bp, Bacteroides uniformis
aacctgccgatgactcgggg

SEQ ID NO: 48384 - DNA, 20 bp, Eubacterium moniliforme
taggggtttcaacacctctg

SEQ ID NO: 48385 - DNA, 20 bp, Bacteroides merdae
atctatggtttgtaaacttc

SEQ ID NO: 48386 - DNA, 20 bp, Kocuria kristinae
gatcgttccagagatggttc

SEQ ID NO: 48387 - DNA, 20 bp, Paenibacillus amylolyticus
ggctcaaccttggttcgcac

SEQ ID NO: 48388 - DNA, 20 bp, Anaerococcus tetradius
actttctggccataaactga

SEQ ID NO: 48389 - DNA, 20 bp, Tissierella praeacuta
aaccgtggtaagcatttgaa

SEQ ID NO: 48390 - DNA, 20 bp, Anaerobiospirillum succiniciproducens
gtgccttcgggaacctacag

SEQ ID NO: 48391 - DNA, 20 bp, Clostridium ramosum
ttcagtaagccatagaaacc

SEQ ID NO: 48392 - DNA, 20 bp, Bacteroides forsythus
cctgtcggcgaccggcgcac

SEQ ID NO: 48393 - DNA, 20 bp, Actinomyces neuii
atctcttaaagggcatcttg

SEQ ID NO: 48394 - DNA, 20 bp, Enterococcus saccharolyticus
gctggcggcgtgcctaatca

SEQ ID NO: 48395 - DNA, 20 bp, Gemella haemolysans
cggataacagcattaactgc

SEQ ID NO: 48396 - DNA, 20 bp, Citrobacter koseri
tctcagagatgagactgtgc

SEQ ID NO: 48397 - DNA, 20 bp, Achromobacter xylosoxidans
tgtctggaatgccgaagaga

SEQ ID NO: 48398 - DNA, 20 bp, Moraxella atlantae
caagagggcgcttaccacgg

SEQ ID NO: 48399 - DNA, 20 bp, Prevotella melaninogenica
ggagattaagtgtgttgtga

SEQ ID NO: 48400 - DNA, 20 bp, Prevotella corporis
aggcagactaataccttatg

SEQ ID NO: 48401 - DNA, 20 bp, Bacillus firmus
atctcgctatcacttacaga

SEQ ID NO: 48402 - DNA, 20 bp, Arcanobacterium bernardiae
gtacagaacaaggccttttt

SEQ ID NO: 48403 - DNA, 20 bp, Staphylococcus cohnii
gtttgatcatggctcaggga

SEQ ID NO: 48404 - DNA, 20 bp, Prevotella bivia
gcaaatacgatctaatcctt

SEQ ID NO: 48405 - DNA, 20 bp, Fusobacterium nucleatum
aatagtgaaaggcggctttg

SEQ ID NO: 48406 - DNA, 20 bp, Brevibacillus choshinensis
aggagctctcttcggagcag

SEQ ID NO: 48407 - DNA, 20 bp, Alicyclobacillus acidocaldarius
cgcgggcgtatccggcatta

SEQ ID NO: 48408 - DNA, 20 bp, Bacteroides forsythus
agatcacgcagaactccgat

SEQ ID NO: 48409 - DNA, 20 bp, Nocardia asteroides
ttgcttcggtaactgaccta

SEQ ID NO: 48410 - DNA, 20 bp, Streptococcus thermophilus
aataccgcataaaagtcgat

SEQ ID NO: 48411 - DNA, 20 bp, Pasteurella aerogenes
cctttgttgccagcacatta

SEQ ID NO: 48412 - DNA, 20 bp, Bacteroides fragilis
aggggcatcaggaagaaagc

SEQ ID NO: 48413 - DNA, 20 bp, Anaerococcus prevotii
gcaggcggaaatgcaagtca

SEQ ID NO: 48414 - DNA, 20 bp, Anaerococcus prevotii
agtgatattaagcaaacctc

SEQ ID NO: 48415 - DNA, 20 bp, Veillonella atypica
gatctagagtatcggagagg

SEQ ID NO: 48416 - DNA, 20 bp, Corynebacterium accolens
aaccatctttagtgtggtgg

SEQ ID NO: 48417 - DNA, 20 bp, Bacteroides stercoris
tgatgctaatcccaaaaacc

SEQ ID NO: 48418 - DNA, 20 bp, Leuconostoc lactis
taataccgcataaaacctaa

SEQ ID NO: 48419 - DNA, 20 bp, Anaerococcus tetradius
agcgatctgaagcgaaactc

SEQ ID NO: 48420 - DNA, 20 bp, Eggerthella lenta
gagcgcgtaggcggcctctc

SEQ ID NO: 48421 - DNA, 20 bp, Leuconostoc lactis
tgataaacatttgagtgagt

SEQ ID NO: 48422 - DNA, 20 bp, Gemella haemolysans
cctgcctcatagactgggac

SEQ ID NO: 48423 - DNA, 20 bp, Neisseria meningitidis
ctctgacacactcgagtcac

SEQ ID NO: 48424 - DNA, 20 bp, Clostridium clostridiiforme
acggcgaagcaagtctgaag

SEQ ID NO: 48425 - DNA, 20 bp, Bacteroides forsythus
gattgaaatgtagacgacgg

SEQ ID NO: 48426 - DNA, 20 bp, Leptotrichia buccalis
gattactgggtgtgggcatg

SEQ ID NO: 48427 - DNA, 20 bp, Campylobacter rectus
gctagtcgaggcagtaatgc

SEQ ID NO: 48428 - DNA, 20 bp, Peptoniphilus indolicus
cgacttactggtcacaaact

SEQ ID NO: 48429 - DNA, 20 bp, Providencia alcalifaciens
ccctgctttgctccttagag

SEQ ID NO: 48430 - DNA, 20 bp, Moellerella wisconsensis
gacagagggggataactact

SEQ ID NO: 48431 - DNA, 20 bp, Achromobacter xylosoxidans
agagatttggcagtgctcgc

SEQ ID NO: 48432 - DNA, 20 bp, Actinomyces turicensis
ttgacgggtaaccggcctga

SEQ ID NO: 48433 - DNA, 20 bp, Streptococcus salivarius
taagtcaagaacgagtgtga

SEQ ID NO: 48434 - DNA, 20 bp, Anaerococcus tetradius
cttgaggtatggaagggaaa

SEQ ID NO: 48435 - DNA, 20 bp, Acinetobacter lwoffii
taatacctagggatagtgga

SEQ ID NO: 48436 - DNA, 20 bp, Lactococcus lactis
ccgactggatgagcagcgaa

SEQ ID NO: 48437 - DNA, 20 bp, Bacteroides vulgatus
cgtaaccgcgaggagcgccc

SEQ ID NO: 48438 - DNA, 20 bp, Fusobacterium varium
tcttcggaggaacttggtga

SEQ ID NO: 48439 - DNA, 20 bp, Anaerobiospirillum succiniciproducens
agagagcttgctctttggct

SEQ ID NO: 48440 - DNA, 20 bp, Salmonella enteritidis
acatccacagaagaatccag

SEQ ID NO: 48441 - DNA, 20 bp, Anaerococcus tetradius
tgacagtaccatacgaataa

SEQ ID NO: 48442 - DNA, 20 bp, Moraxella lacunata
taccgcatacgtcttacgag

SEQ ID NO: 48443 - DNA, 20 bp, Arcanobacterium bernardiae
tctggatagggatgggctca

SEQ ID NO: 48444 - DNA, 20 bp, Leptotrichia buccalis
atgtgcccggcaatgaaaag

SEQ ID NO: 48445 - DNA, 20 bp, Bacteroides uniformis
aattgcaactgaatgatgtg

SEQ ID NO: 48446 - DNA, 20 bp, Anaerococcus tetradius
gagggaattagagatagttc

SEQ ID NO: 48447 - DNA, 20 bp, Gordonia bronchialis
gtggtttgccttgtgccttc

SEQ ID NO: 48448 - DNA, 20 bp, Fusobacterium nucleatum
agtgaaaggcggctttgctg

SEQ ID NO: 48449 - DNA, 20 bp, Clostridium botulinum
aagagaatcgcatgattttc

SEQ ID NO: 48450 - DNA, 20 bp, Alcaligenes faecalis
acttttggcagagaagaaaa

SEQ ID NO: 48451 - DNA, 20 bp, Bacteroides merdae
gggtcccgcatgggaatatt

SEQ ID NO: 48452 - DNA, 20 bp, Anaerococcus tetradius
gagggaattagagatagttt

SEQ ID NO: 48453 - DNA, 20 bp, Leptotrichia buccalis
tgccgatgatgaagatagtt

SEQ ID NO: 48454 - DNA, 20 bp, Clostridium botulinum
gtaggtacaataagacgcaa

SEQ ID NO: 48455 - DNA, 20 bp, Leptotrichia buccalis
ttaacacatgcaagtctttg

SEQ ID NO: 48456 - DNA, 20 bp, Anaerobiospirillum succiniciproducens
ggcatgtaggcggaaaggta

SEQ ID NO: 48457 - DNA, 20 bp, Veillonella atypica
gggatggaaactgctgatct

SEQ ID NO: 48458 - DNA, 20 bp, Enterococcus raffinosus
cgaaagaaaaggagtggcga

SEQ ID NO: 48459 - DNA, 20 bp, Clostridium septicum
agcgaggggagtttcttcgg

SEQ ID NO: 48460 - DNA, 20 bp, Acinetobacter johnsonii
ggaggaggctacttggatta

SEQ ID NO: 48461 - DNA, 20 bp, Anaerobiospirillum succiniciproducens
gggaacctacagacaggtgc

SEQ ID NO: 48462 - DNA, 20 bp, Streptococcus sp.
ttgattattgcatgataatt

SEQ ID NO: 48463 - DNA, 20 bp, Oligella ureolytica
gctgacggtagttgaggaat

SEQ ID NO: 48464 - DNA, 20 bp, Actinobacillus ureae
aggattaaagtgtgggaccg

SEQ ID NO: 48465 - DNA, 20 bp, Clostridium botulinum
gtgtagggggtatcaactcc

SEQ ID NO: 48466 - DNA, 20 bp, Neisseria lactamica
ccggttttgacatgtacgga

SEQ ID NO: 48467 - DNA, 20 bp, Prevotella disiens
tgttgaggtccttcgggact

SEQ ID NO: 48468 - DNA, 20 bp, Corynebacterium glucuronolyticum
gagagggtgtgcggccacat

SEQ ID NO: 48469 - DNA, 20 bp, Streptococcus constellatus
acgacgctggcggcgtgcct

SEQ ID NO: 48470 - DNA, 20 bp, Bacillus simplex
tctcgcatgagagaagatgg

SEQ ID NO: 48471 - DNA, 20 bp, Campylobacter rectus
ttatgacggtacccaaggaa

SEQ ID NO: 48472 - DNA, 20 bp, Facklamia ignava
cgtggctttgatgcatagcc

SEQ ID NO: 48473 - DNA, 20 bp, Moraxella  catarrhalis
cgttgggtcttttaaagact

SEQ ID NO: 48474 - DNA, 20 bp, Enterobacter sakazakii
gtcagcttgagtctcgtaga

SEQ ID NO: 48475 - DNA, 20 bp, Campylobacter rectus
gtcgaacggagattaagtag

SEQ ID NO: 48476 - DNA, 20 bp, Enterococcus cecorum
gccaatctcttaaagctctt

SEQ ID NO: 48477 - DNA, 20 bp, Nocardia asteroides
gaggctcctttagttaatac

SEQ ID NO: 48478 - DNA, 20 bp, Haemophilus influenzae
gttaatagcacatcaaattg

SEQ ID NO: 48479 - DNA, 20 bp, Brevibacillus brevis
aaagctgaaagtcggtttcg

SEQ ID NO: 48480 - DNA, 20 bp, Bacteroides capilosus
gaaggtgggttcgataattg

SEQ ID NO: 48481 - DNA, 20 bp, Prevotella intermedia
gcttgcacattctggacgtc

SEQ ID NO: 48482 - DNA, 20 bp, Helcococcus ovis
ggaagagattaaagaaggaa

SEQ ID NO: 48483 - DNA, 20 bp, Corynebacterium urealyticum
atctttagtgtggttggtgg

SEQ ID NO: 48484 - DNA, 20 bp, Vibrio metschnikovii
tatcgttaatagcggtattc

SEQ ID NO: 48485 - DNA, 20 bp, Tissierella praeacuta
gaaactttaattatcttagc

SEQ ID NO: 48486 - DNA, 20 bp, Bacillus pumilus
ttagccaatcccataaatct

SEQ ID NO: 48487 - DNA, 20 bp, Actinomyces bovis
gagggagccgtgcgaaggta

SEQ ID NO: 48488 - DNA, 20 bp, Listeria innocua
taataccgaatgatagagtg

SEQ ID NO: 48489 - DNA, 20 bp, Pediococcus acidilactici
gtataacagagaaaaccgcc

SEQ ID NO: 48490 - DNA, 20 bp, Clostridium ramosum
gtgcaggagaggatcgtgga

SEQ ID NO: 48491 - DNA, 20 bp, Bacteroides fragilis
tgcagtatgtatactgtttt

SEQ ID NO: 48492 - DNA, 20 bp, Gemella morbillorum
ctggtgcttgcactagaaaa

SEQ ID NO: 48493 - DNA, 20 bp, Bacteroides fragilis
gcaatcaccgctgtgaaggt

SEQ ID NO: 48494 - DNA, 20 bp, Gemella haemolysans
ttagacacagatacaggtgg

SEQ ID NO: 48495 - DNA, 20 bp, Lactococcus lactis
tcatcaagtgacggtaacta

SEQ ID NO: 48496 - DNA, 20 bp, Actinomyces meyeri
cggaaatgggtgctaatact

SEQ ID NO: 48497 - DNA, 20 bp, Actinomyces bovis
tggttaaagttcggggctta

SEQ ID NO: 48498 - DNA, 20 bp, Vibrio cholerae
ctccagcgtctccgctagat

SEQ ID NO: 48499 - DNA, 20 bp, Leuconostoc pseudomesenteroides
aacagctagaatagggaatg

SEQ ID NO: 48500 - DNA, 20 bp, Pseudomonas fluorescens
cttacctaatacgtgagtat

SEQ ID NO: 48501 - DNA, 20 bp, Corynebacterium amycolatum
gaagggtttctgacggtaga

SEQ ID NO: 48502 - DNA, 20 bp, Facklamia ignava
aactgttataggtttgacgg

SEQ ID NO: 48503 - DNA, 20 bp, Clostridium cadaveris
acttgacatgtcctgaatta

SEQ ID NO: 48504 - DNA, 20 bp, Kocuria kristinae
gtggtggaaagggttatgta

SEQ ID NO: 48505 - DNA, 20 bp, Fusobacterium mortiferum
gctatatgcgctgcaggaga

SEQ ID NO: 48506 - DNA, 20 bp, Tissierella praeacuta
tgaaaggcttgagttaagga

SEQ ID NO: 48507 - DNA, 20 bp, Peptostreptococcus anaerobius
actgaaaagtttactaatac

SEQ ID NO: 48508 - DNA, 20 bp, Actinomyces viscosus
aaaggtttgttccggtgggg

SEQ ID NO: 48509 - DNA, 20 bp, Anaerococcus prevotii
acctgccttagacattggga

SEQ ID NO: 48510 - DNA, 20 bp, Corynebacterium jeikeium
gctaggtgtgggggttttat

SEQ ID NO: 48511 - DNA, 20 bp, Pseudomonas citronellolis
actgcatccataactgcctg

SEQ ID NO: 48512 - DNA, 20 bp, Anaerobiospirillum succiniciproducens
gtacagagggaaacgatacc

SEQ ID NO: 48513 - DNA, 20 bp, Arcanobacterium bernardiae
gtgccagagatggtgcagcc

SEQ ID NO: 48514 - DNA, 20 bp, Tissierella praeacuta
tgaaactttaattatcttag

SEQ ID NO: 48515 - DNA, 20 bp, Bacteroides stercoris
atgtcagcggccaagcgaaa

SEQ ID NO: 48516 - DNA, 20 bp, Streptococcus thermophilus
ataccgcataaaagtcgata

SEQ ID NO: 48517 - DNA, 20 bp, Anaerococcus tetradius
ataagaataaggtccggcta

SEQ ID NO: 48518 - DNA, 20 bp, Serratia proteamaculans
agtgtgttaatagcacattg

SEQ ID NO: 48519 - DNA, 20 bp, Rothia mucilaginosa
gaccgcatcagagatggtgt

SEQ ID NO: 48520 - DNA, 20 bp, Clostridium botulinum
ggtgtagggggtatcaactc

SEQ ID NO: 48521 - DNA, 20 bp, Pasteurella trehalosi
atacagagggtagcgagcca

SEQ ID NO: 48522 - DNA, 20 bp, Prevotella corporis
aaggcagactaataccttat

SEQ ID NO: 48523 - DNA, 20 bp, Alcaligenes faecalis
gtaaagtacttttggcagag

SEQ ID NO: 48524 - DNA, 20 bp, Tissierella praeacuta
caccaagacagcgatgggta

SEQ ID NO: 48525 - DNA, 20 bp, Staphylococcus chromogenes
tcgagcgaactgacgaggag

SEQ ID NO: 48526 - DNA, 20 bp, Turicella otitidis
tacactggatcgggctagag

SEQ ID NO: 48527 - DNA, 20 bp, Paenibacillus thiaminolyticus
tcgcatcggaaactgtgtga

SEQ ID NO: 48528 - DNA, 20 bp, Prevotella loescheii
cattgacggcatccgatttg

SEQ ID NO: 48529 - DNA, 20 bp, Streptococcus equi
cgttaaggagccagccgcct

SEQ ID NO: 48530 - DNA, 20 bp, Bacillus sp
gccctagagatagggagttc

SEQ ID NO: 48531 - DNA, 20 bp, Anaerococcus prevotii
atgttcagttaagtctggca

SEQ ID NO: 48532 - DNA, 20 bp, Bacteroides fragilis
gtcagtcttgagtacagtag

SEQ ID NO: 48533 - DNA, 20 bp, Collinsella aerofaciens
gacgctaggtgtggggggac

SEQ ID NO: 48534 - DNA, 20 bp, Acinetobacter baumannii
aggtagcttgctactggacc

SEQ ID NO: 48535 - DNA, 20 bp, Bacteroides capilosus
  misc_feature (2)..(2): n is a, c, g, or t
tngatgaataagccacggct

SEQ ID NO: 48536 - DNA, 20 bp, Corynebacterium falsenii
ccttgcttgcaggggtactc

SEQ ID NO: 48537 - DNA, 20 bp, Corynebacterium accolens
taggtgtgagggtctttcta

SEQ ID NO: 48538 - DNA, 20 bp, Tissierella praeacuta
tttaccttcgggtacagggg

SEQ ID NO: 48539 - DNA, 20 bp, Propionibacterium freudenreichii
cggaagtgaaattccagggc

SEQ ID NO: 48540 - DNA, 20 bp, Staphylococcus aureus
atgtggttaattcgaagcaa

SEQ ID NO: 48541 - DNA, 20 bp, Leptotrichia buccalis
ccctgcagacagggataaca

SEQ ID NO: 48542 - DNA, 20 bp, Helcococcus ovis
ggatatactagagatagtat

SEQ ID NO: 48543 - DNA, 20 bp, Tissierella praeacuta
tctcgcgtcccattagttag

SEQ ID NO: 48544 - DNA, 20 bp, Porphyromonas endodontalis
acgcgaggaaggggcggatg

SEQ ID NO: 48545 - DNA, 20 bp, Clostridium paraputrificum
cgcatgaagtagcaattaaa

SEQ ID NO: 48546 - DNA, 20 bp, Acinetobacter lwoffii
gtggccaattaagtcaaatg

SEQ ID NO: 48547 - DNA, 20 bp, Helcococcus ovis
ctagttgtcgggagtcaaat

SEQ ID NO: 48548 - DNA, 20 bp, Prevotella bivia
gaataaagatttatcggtta

SEQ ID NO: 48549 - DNA, 20 bp, Streptococcus gordonii
agtagaacgcacagtttata

SEQ ID NO: 48550 - DNA, 20 bp, Acinetobacter genospecies 3
ctgcaaagagggcggttacc

SEQ ID NO: 48551 - DNA, 20 bp, Clostridium clostridiiforme
tgaagttttcggatggaatc

SEQ ID NO: 48552 - DNA, 20 bp, Leuconostoc pseudomesenteroides
atgacacaaagttaaaaggc

SEQ ID NO: 48553 - DNA, 20 bp, Bacteroides forsythus
gagatcacgcagaactccga

SEQ ID NO: 48554 - DNA, 20 bp, Vibrio hollisae
cgctattcgagcggccgacg

SEQ ID NO: 48555 - DNA, 20 bp, Alicyclobacillus acidocaldarius
ggtgtgtccccccaacacct

SEQ ID NO: 48556 - DNA, 20 bp, Propionibacterium freudenreichii
tcggaagtgaaattccaggg

SEQ ID NO: 48557 - DNA, 20 bp, Capnocytophaga gingivalis
ggcaccccaaggctacgata

SEQ ID NO: 48558 - DNA, 20 bp, Prevotella melaninogenica
agataatgacgcccttcggg

SEQ ID NO: 48559 - DNA, 20 bp, Streptococcus macacae
ggtgaggtaaccgttaaggg

SEQ ID NO: 48560 - DNA, 20 bp, Brevibacillus brevis
aggaaaagctgaaagtcggt

SEQ ID NO: 48561 - DNA, 20 bp, Fusobacterium nucleatum
tgattttaaggcatcttaga

SEQ ID NO: 48562 - DNA, 20 bp, Bacteroides capilosus
accgcaaggagggcgcggcc

SEQ ID NO: 48563 - DNA, 20 bp, Bacillus pallidus
ctctaaggtgactgccggct

SEQ ID NO: 48564 - DNA, 20 bp, Streptococcus bovis
ctttagcttgctagagtaga

SEQ ID NO: 48565 - DNA, 20 bp, Fusobacterium nucleatum
caatggaccgagagtctgat

SEQ ID NO: 48566 - DNA, 20 bp, Listeria innocua
gcgcatgccacgctcttgaa

SEQ ID NO: 48567 - DNA, 20 bp, Arcanobacterium haemolyticum
ctgaacaaggcgaaagttga

SEQ ID NO: 48568 - DNA, 20 bp, Anaerobiospirillum succiniciproducens
cccttacggcagggctacac

SEQ ID NO: 48569 - DNA, 20 bp, Serratia odorifera
atacgctgttggattgacgt

SEQ ID NO: 48570 - DNA, 20 bp, Vibrio hollisae
gaatccgccagaagtgggta

SEQ ID NO: 48571 - DNA, 20 bp, Nocardia asteroides
aaagagagtggacgttactc

SEQ ID NO: 48572 - DNA, 20 bp, Prevotella melaninogenica
aacgtctgacttgcagcgca

SEQ ID NO: 48573 - DNA, 20 bp, Gemella haemolysans
cagcattaactgcatggttg

SEQ ID NO: 48574 - DNA, 20 bp, Streptococcus dysgalactiae
ttgacatcctcctgaccggt

SEQ ID NO: 48575 - DNA, 20 bp, Prevotella denticola
aattgcatccaatcttgaaa

SEQ ID NO: 48576 - DNA, 20 bp, Paenibacillus thiaminolyticus
ttccataggtgacggtacct

SEQ ID NO: 48577 - DNA, 20 bp, Campylobacter sputorum
ggttgttgctgtgctagtca

SEQ ID NO: 48578 - DNA, 20 bp, Bacteroides distasonis
tgtaagcggcacagcgaaag

SEQ ID NO: 48579 - DNA, 20 bp, Bacteroides merdae
tccaaaccatgtctcagttc

SEQ ID NO: 48580 - DNA, 20 bp, Bacteroides thetaiotaomicron
ggtggacagttaagtcagtt

SEQ ID NO: 48581 - DNA, 20 bp, Bacteroides uniformis
tcagccgcaaggcagttgtg

SEQ ID NO: 48582 - DNA, 20 bp, Acinetobacter junii
gagactaatactcttggata

SEQ ID NO: 48583 - DNA, 20 bp, Enterococcus cecorum
gatgagagtggaaagttcat

SEQ ID NO: 48584 - DNA, 20 bp, Enterobacter gergoviae
tagcttaaaactcaaatgaa

SEQ ID NO: 48585 - DNA, 20 bp, Bacteroides forsythus
gtataactgacactgaagca

SEQ ID NO: 48586 - DNA, 20 bp, Eggerthella lenta
cgcgtaggcggcctctcaag

SEQ ID NO: 48587 - DNA, 20 bp, Leuconostoc argentinum
ctagttcgacggtaccatac

SEQ ID NO: 48588 - DNA, 20 bp, Streptococcus constellatus
tgcaagagcatcactaccag

SEQ ID NO: 48589 - DNA, 20 bp, Bacteroides thetaiotaomicron
acccgggcttaaattgcatt

SEQ ID NO: 48590 - DNA, 20 bp, Ochrobactrum intermedium
gtgaaagatttatcggtgat

SEQ ID NO: 48591 - DNA, 20 bp, Bacillus lentus
agaccctgtctccagggcgg

SEQ ID NO: 48592 - DNA, 20 bp, Neisseria lactamica
ggtgaagtcgtacaaggtaa

SEQ ID NO: 48593 - DNA, 20 bp, Bacteroides merdae
gccgagaggctgaaccagcc

SEQ ID NO: 48594 - DNA, 20 bp, Actinomyces naeslundii
tcttctggataaccgcatga

SEQ ID NO: 48595 - DNA, 20 bp, Veillonella atypica
agaaacactctctcagttcg

SEQ ID NO: 48596 - DNA, 20 bp, Actinomyces naeslundii
cggagacggggtttcctcct

SEQ ID NO: 48597 - DNA, 20 bp, Facklamia ignava
gctgtcactgaaggatggtc

SEQ ID NO: 48598 - DNA, 20 bp, Acinetobacter haemolyticus
cttgctacattacctagcgg

SEQ ID NO: 48599 - DNA, 20 bp, Anaerococcus prevotii
tcaggtgtaaaaggcagtag

SEQ ID NO: 48600 - DNA, 20 bp, Moraxella  catarrhalis
tttaaagacttagtgacgca

SEQ ID NO: 48601 - DNA, 20 bp, Streptococcus sobrinus
cattgcttcactatcagatg

SEQ ID NO: 48602 - DNA, 20 bp, Propionibacterium acnes
acagagagtggcgagcctgt

SEQ ID NO: 48603 - DNA, 20 bp, Propionibacterium avidum
attgcgtcggaagtgaaaac

SEQ ID NO: 48604 - DNA, 20 bp, Enterococcus cecorum
accgtagcttgctacaccga

SEQ ID NO: 48605 - DNA, 20 bp, Streptococcus uberis
aggactggtgcttgcactgg

SEQ ID NO: 48606 - DNA, 20 bp, Enterococcus cecorum
accgtagcttgctacaccgg

SEQ ID NO: 48607 - DNA, 20 bp, Bacillus lentus
aaagataatctatccggtat

SEQ ID NO: 48608 - DNA, 20 bp, Alcaligenes faecalis
ggtactgctgacggtatctg

SEQ ID NO: 48609 - DNA, 20 bp, Tetragenococcus halophilus
aaggcctagcgaatctctga

SEQ ID NO: 48610 - DNA, 20 bp, Moraxella osloensis
taaagcgagtgtaggtggct

SEQ ID NO: 48611 - DNA, 20 bp, Alicyclobacillus acidocaldarius
gccttcccccgcaagaagat

SEQ ID NO: 48612 - DNA, 20 bp, Chromobacterium violaceum
acctgggaacggcattggag

SEQ ID NO: 48613 - DNA, 20 bp, Paenibacillus peoriae
gagcggggttgtttagaagc

SEQ ID NO: 48614 - DNA, 20 bp, Brochothrix campestris
ctcacagctggggataacat

SEQ ID NO: 48615 - DNA, 20 bp, Pasteurella trehalosi
aggaaggtgttttgtttaat

SEQ ID NO: 48616 - DNA, 20 bp, Tissierella praeacuta
gaatgaaactttaattatct

SEQ ID NO: 48617 - DNA, 20 bp, Bacteroides distasonis
gaaggttctatggatcgtaa

SEQ ID NO: 48618 - DNA, 20 bp, Streptococcus thoraltensis
ctctgttataagcgaagaat

SEQ ID NO: 48619 - DNA, 20 bp, Corynebacterium group F
cttgtgaggggatgctaatc

SEQ ID NO: 48620 - DNA, 20 bp, Fusobacterium varium
gcgtttgacatcccaagaag

SEQ ID NO: 48621 - DNA, 20 bp, Paenibacillus popilliae
agggaagaacgccttgtaga

SEQ ID NO: 48622 - DNA, 20 bp, Paenibacillus glucanolyticus
ctctgaatctgctagagata

SEQ ID NO: 48623 - DNA, 20 bp, Anaerobiospirillum succiniciproducens
ggagtggaacccacaaagcg

SEQ ID NO: 48624 - DNA, 20 bp, Staphylococcus carnosus
taactatgcgcaccttgacg

SEQ ID NO: 48625 - DNA, 20 bp, Anaerococcus prevotii
gaaggcgacttactgggctc

SEQ ID NO: 48626 - DNA, 20 bp, Brevundimonas diminuta
ccgccacggagacgtggctt

SEQ ID NO: 48627 - DNA, 20 bp, Facklamia ignava
agttgcattggaaactggtc

SEQ ID NO: 48628 - DNA, 20 bp, Streptococcus constellatus
gcacaggatgcaccgtagtt

SEQ ID NO: 48629 - DNA, 20 bp, Facklamia hominis
gcggagtgacggtatctaac

SEQ ID NO: 48630 - DNA, 20 bp, Kytococcus sedentarius
taaccctggacgtgcagtgg

SEQ ID NO: 48631 - DNA, 20 bp, Bacteroides distasonis
aaaggatcggcctagggtaa

SEQ ID NO: 48632 - DNA, 20 bp, Campylobacter rectus
agatcaagaagaatacccat

SEQ ID NO: 48633 - DNA, 20 bp, Clostridium limosum
gctcaaccccggtgctgcat

SEQ ID NO: 48634 - DNA, 20 bp, Bacillus alcalophilus
atggctccggctatcactac

SEQ ID NO: 48635 - DNA, 20 bp, Microbacterium terregens
agtcccgcaatgagcgcaac

SEQ ID NO: 48636 - DNA, 20 bp, Clostridium clostridiiforme
gtctggtgcgaaaaactccg

SEQ ID NO: 48637 - DNA, 20 bp, Campylobacter rectus
aaatcatccagagatggaag

SEQ ID NO: 48638 - DNA, 20 bp, Neisseria lactamica
gctatccgagcggccgatat

SEQ ID NO: 48639 - DNA, 20 bp, Aeromonas hydrophila
gttgatgcctaatacgtatc

SEQ ID NO: 48640 - DNA, 20 bp, Bacteroides capilosus
actgaccccctccgtgccgc

SEQ ID NO: 48641 - DNA, 20 bp, Myroides odoratus
tagctgttcggttttcggac

SEQ ID NO: 48642 - DNA, 20 bp, Campylobacter sputorum
atgagtgctaatacctcata

SEQ ID NO: 48643 - DNA, 20 bp, Neisseria polysaccharea
ataccgcatacgtcttgaga

SEQ ID NO: 48644 - DNA, 20 bp, Paenibacillus macerans
gcactcctgagagttagcgg

SEQ ID NO: 48645 - DNA, 20 bp, Pantoea agglomerans
ggcgatggggttaataacct

SEQ ID NO: 48646 - DNA, 20 bp, Campylobacter lari
gttgaactgcttgggaaact

SEQ ID NO: 48647 - DNA, 20 bp, Prevotella denticola
ctctgcagcaatctggtgta

SEQ ID NO: 48648 - DNA, 20 bp, Bacteroides fragilis
cagtgagcaatcaccgctgt

SEQ ID NO: 48649 - DNA, 20 bp, Peptoniphilus indolicus
tagcgatagcaagcgaatct

SEQ ID NO: 48650 - DNA, 20 bp, Micrococcus luteus
aataccggataggagcgccc

SEQ ID NO: 48651 - DNA, 20 bp, Leptotrichia buccalis
ctggggtgaaaacttgcggc

SEQ ID NO: 48652 - DNA, 20 bp, Corynebacterium amycolatum
catcgacgaagggtttctga

SEQ ID NO: 48653 - DNA, 20 bp, Campylobacter sputorum
tgtgaaatctagtagcttaa

SEQ ID NO: 48654 - DNA, 20 bp, Corynebacterium urealyticum
aatctttagtgtggttggtg

SEQ ID NO: 48655 - DNA, 20 bp, Tissierella praeacuta
aataccttatgacacttaaa

SEQ ID NO: 48656 - DNA, 20 bp, Anaerococcus prevotii
ctgtaagcatttgaaactgc

SEQ ID NO: 48657 - DNA, 20 bp, Bacteroides uniformis
gtagaactattaaagaattt

SEQ ID NO: 48658 - DNA, 20 bp, Clostridium clostridiiforme
taagcgcacagggccgcatg

SEQ ID NO: 48659 - DNA, 20 bp, Campylobacter curvus
atacgggaaagtttttcggt

SEQ ID NO: 48660 - DNA, 20 bp, Prevotella melaninogenica
aattgcagaggaaggattta

SEQ ID NO: 48661 - DNA, 20 bp, Propionibacterium freudenreichii
gacatgtactggaagcgttc

SEQ ID NO: 48662 - DNA, 20 bp, Streptococcus sanguinis
atgataattaattgaaaggt

SEQ ID NO: 48663 - DNA, 20 bp, Bacteroides merdae
atcactagttactaacaggt

SEQ ID NO: 48664 - DNA, 20 bp, Bacteroides uniformis
aggcggacgcttaagtcagt

SEQ ID NO: 48665 - DNA, 1503 bp, Cedecea davisae
gattgaacgctggcggcaggcctaacacatgcaagtcgagcggtaacagggagtagcttgctactccgctgacgagcggcggacgggtgagtaatgtctggggatctgcctgatggagggggataactactggaaacggtagctaataccgcataacgtcgcaagaccaaagagggggaccttcgggcctcttgccatcggatgaacccagatgggattagctagtaggtggggtaatggctcacctaggcgacgatccctagctggtctgagaggatgaccagccacactggaactgagacacggtccagactcctacgggaggcagcagtggggaatattgcacaatgggcgcaagcctgatgcagccatgccgcgtgtgtgaagaaggccttcgggttgtaaagcactttcagcgaggaggaaggcattaaggttaataacctcggtgattgacgttactcgcagaagaagcaccggctaactccgtgccagcagccgcggtaatacggagggtgcaagcgttaatcggaattactgggcgtaaagcgcacgcaggcggtttgttaagtcggatgtgaaatccccgggctcaacctgggaactgcattcgaaactggcaagcttgagtcttgtagaggggggtagaattccaggtgtagcggtgaaatgcgtagagatctggaggaataccggtggcgaaggcggccccctggacaaagactgacgctcaggtgcgaaagcgtggggagcaaacaggattagataccctggtagtccacgccgtaaacgatgtcgacttggaggttgtgcccttgaggcgtggcttccggagctaacgcgttaagtcgaccgcctggggagtacggccgcaaggttaaaactcaaatgaattgacgggggcccgcacaagcggtggagcatgtggtttaattcgatgcaacgcgaagaaccttacctactcttgacatccagagaactttccagagatggattggtgccttcgggaactctgagacaggtgctgcatggctgtcgtcagctcgtgttgtgaaatgttgggttaagtcccgcaacgagcgcaacccttatcctttgttgccagcggttcggccgggaactcaaaggagactgccagtgataaactggaggaaggtggggatgacgtcaagtcatcatggcccttacgagtagggctacacacgtgctacaatggcgcatacaaagagaagcgacctcgcgagagcaagcggacctcataaagtgcgtcgtagtccggattggagtctgcaactcgactccatgaagtcggaatcgctagtaatcgtagatcagaatgctacggtgaatacgttcccgggccttgtacacaccgcccgtcacaccatgggagtgggttgcaaaagaagtaggtagcttaaccttcgggagggcgcttaccactttgtgattcatgactggggtgaagtcgtaacaaggtaaccgtaggggaacctgcggtgg

SEQ ID NO: 48666 - DNA, 1514 bp, Cedecea davisae
attgaacgctggcggcaggcctaacacatgcaagtcgagcggtaacagggagtagcttgctactccgctgacgagcggcggacgggtgagtaatgtctggggatctgcctgatggagggggataactactggaaacggtagctaataccgcataacgtcgcaagaccaaagagggggaccttcgggcctcttgccatcggatgaacccagatgggattagctagtaggtggggtaatggctcacctaggcgacgatccctagctggtctgagaggatgaccagccacactggaactgagacacggtccagactcctacgggaggcagcagtggggaatattgcacaatgggcgcaagcctgatgcagccatgccgcgtgtgtgaagaaggccttcgggttgtaaagcactttcagcgaggaggaaggcattaaggttaataaccttagtgattgacgttactcgcagaagaagcaccggctaactccgtgccagcagccgcggtaatacggagggtgcaagcgttaatcggaattactgggcgtaaagcgcacgcaggcggtttgttaagtcggatgtgaaatccccgggctcaacctgggaactgcattcgaaactggcaagcttgagtcttgtagaggggggtagaattccaggtgtagcggtgaaatgcgtagagatctggaggaataccggtggcgaaggcggccccctggacaaagactgacgctcaggtgcgaaagcgtggggagcaaacaggattagataccctggtagtccacgccgtaaacgatgtcgacttggaggttgtgcccttgaggcgtggcttccggagctaacgcgttaagtcgaccgcctggggagtacggccgcaaggttaaaactcaaatgaattgacgggggcccgcacaagcggtggagcatgtggtttaattcgatgcaacgcgaagaaccttacctactcttgacatccagagaactttccagagatggattggtgccttcgggaactctgagacaggtgctgcatggctgtcgtcagctcgtgttgtgaaatgttgggttaagtcccgcaacgagcgcaacccttatcctttgttgccagcggttcggccgggaactcaaaggagactgccagtgataaactggaggaaggtggggatgacgtcaagtcatcatggcccttacgagtagggctacacacgtgctacaatggcgcatacaaagagaagcgacctcgcgagagcaagcggacctcataaagtgcgtcgtagtccggattggagtctgcaactcgactccatgaagtcggaatcgctagtaatcgtagatcagaatgctacggtgaatacgttcccgggccttgtacacaccgcccgtcacaccatgggagtgggttgcaaaagaagtaggtagcttaaccttcgggagggcgcttaccactttgtgattcatgactggggtgaagtcgtaacaaggtaaccgtaggggaacctgcggttggatcacctcctt

SEQ ID NO: 48667 - DNA, 1436 bp, Cedecea lapagei
gcaggttcccctacggttaccttgttacgacttcaccccagtcatgaatcacaaagtggtaagcgccctcccgaaggttaagctacctacttcttttgcaacccactcccatggtgtgacgggcggtgtgtacaaggcccgggaacgtattcaccgtagcattctgatctacgattactagcgattccgacttcatggagtcgagttgcagactccaatccggactacgacgcactttatgaggtccgcttgctctcgcgaggtcgcttctctttgtatgcgccattgtagcacgtgtgtagccctactcgtaagggccatgatgacttgacgtcatccccaccttcctccagtttatcactggcagtctcctttgagttcccggccgaaccgctggcaacaaaggataagggttgcgctcgttgcgggacttaacccaacatttcacaacacgagctgacgacagccatgcagcacctgtctcagagttcccgaaggcaccaatccatctctggtaagttctctggatgtcaagagtaggtaaggttcttcgcgttgcatcgaattaaaccacatgctccaccgcttgtgcgggcccccgtcaattcatttgagttttaaccttgcggccgtactccccaggcggtcgacttaacgcgttagctccggaagccacgcctcaagggcacaacctccaagtcgacatcgtttacggcgtggactaccagggtatctaatcctgtttgctccccacgctttcgcacctgagcgtcagtctttgtccagggggccgccttcgccaccggtattcctccagatctctacgcatttcaccgctacacctggaattctacccccctctacaagactcaagcttgccagtttcgaatgcagttcccaggttgagcccggggatttcacatccgacttaacaaaccgcctgcgtgcgctttacgcccagtaattccgattaacgcttgcaccctccgtattaccgcggctgctggcacggagttagccggtgcttcttctgcgagtaacgtcaatcgacaaggttattaaccttatcgccttcctcctcgctgaaagtactttacaacccgaaggccttcttcatacacgcggcatggctgcatcaggcttgcgcccattgtgcaatattccccactgctgcctcccgtaggagtctggaccgtgtctcagttccagtgtggctggtcatcctctcagaccagctagggatcgtcgcctaggtgagccgttaccccacctactagctaatcccatctgggttcatctgatggcaagaggcccgaaggtccccctctttggtcttgcgacgttatgcggtattagctaccgtttccagtagttatccccctccatcaggcagatccccagacattactcacccgtccgccgctcgtcacccagga

SEQ ID NO: 48668 - DNA, 1533 bp, Cedecea lapagei
gtgatccaaccgcaggttcccctacgggttaccttgttacgacttcaccccagtcatgaatcacaaagtggtaagcgccctcccgaaggttaagctacctacttcttttgcaacccactcccatggtgtgacgggcggtgtgtacaaggcccgggaacgtattcaccgtagcattctgatctacgattactagcgattccgacttcatggagtcgagttgcagactccaatccggactacgacgcactttatgaggtccgcttgctctcgcgaggtcgcttctctttgtatgcgccattgtagcacgtgtgtagccctactcgtaagggccatgatgacttgacgtcatccccaccttcctccagtttatcactggcagtctcctttgagttcccggccgaaccgctggcaacaaaggataagggttgcgctcgttgcgggacttaacccaacatttcacaacacgagctgacgacagccatgcagcacctgtctcagagttcccgaaggcaccaatccatctctggaaagttctctggatgtcaagagtaggtaaggttcttcgcgttgcatcgaattaaaccacatgctccaccgcttgtgcgggcccccgtcaattcatttgagttttaaccttgcggccgtactccccaggcggtcgacttaacgcgttagctccggaagccacgcctcaagggcacaacctccaagtcgacatcgtttacggcgtggactaccagggtatctaatcctgtttgctccccacgctttcgcacctgagcgtcagtctttgtccagggggccgccttcgccaccggtattcctccagatctctacgcatttcaccgctacacctggaattctacccccctctacaagactcaagcttgccagtttcgaatgcagttcccaggttgagcccggggatttcacatccgacttaacaaaccgcctgcgtgcgctttacgcccagtaattccgattaacgcttgcaccctccgtattaccgcggctgctggcacggagttagccggtgcttcttctgcgagtaacgtcaatcgctaaggttattaaccttattgccttcctcctcgctgaaagtactttacaacccgaaggccttcttcatacacgcggcatggctgcatcaggcttgcgcccattgtgcaatattccccactgctgcctcccgtaggagtctggaccgtgtctcagttccagtgtggctggtcatcctctcagaccagctagggatcgtcgcctaggtgagccgttaccccacctactagctaatcccatctgggttcatctgatggcaagaggcccgaaggtccccctctttggtcttgcgacgttatgcggtattagctaccgtttccagtagttatccccctccatcaggcagatccccagacattactcacccgtccgccgctcgtcacccaggagagcaagctctcccgtgctaccgctcgacttgcatgtgttaggcctgcgcgacagcgttcaatctgagcccaggatcaaactcta

SEQ ID NO: 48669 - DNA, 1494 bp, Cedecea neteri
attgaacgctggcggcaggcctaacacatgcaagtcgagcggtagcacgggagagcttgctctctgggtgacgagcggcggacgggtgagtaatgtctggggatctgcctgatggagggggataactactggaaacggtagctaataccgcataacgtcgcaagaccaaagagggggaccttcgggcctcttgccatcagatgaacccagatgggattagctagtaggtgaggtaatggctcacctaggcgacgatccctagctggtctgagaggatgaccagccacactggaactgagacacggtccagactcctacgggaggcagcagtggggaatattgcacaatgggcgcaagcctgatgcagccatgccgcgtgtatgaagaaggccttcgggttgtaaagtactttcagcgaggaggaaggcgttaaggttaataaccttagcgattgacgttactcgcagaagaagcaccggctaactccgtgccagcagccgcggtaatacggagggtgcaagcgttaatcggaattactgggcgtaaagcgcacgcaggcggtttgttaagtcggatgtgaaatccccgggctcaacctgggaactgcattcgaaactggcaagcttgagtcttgtagaggggggtagaattccaggtgtagcggtgaaatgcgtagagatctggaggaataccggtggcgaaggcggccccctggacaaagactgacgctcaggtgcgaaagcgtggggagcaaacaggattagataccctggtagtccacgccgtaaacgatgtcgacttggaggttgtgcccttgaggcgtggcttccggagctaacgcgttaagtcgaccgcctggggagtacggccgcaaggttaaaactcaaatgaattgacgggggcccgcacaagcggtggagcatgtggtttaattcgatgcaacgcgaagaaccttacctactcttgacatccagagaactttccagagatggattggtgccttcgggaactctgagacaggtgctgcatggctgtcgtcagctcgtgttgtgaaatgttgggttaagtcccgcaacgagcgcaacccttatcctttgttgccagcggttcggccgggaactcaaaggagactgccagtgataaactggaggaaggtggggatgacgtcaagtcatcatggcccttacgagtagggctacacacgtgctacaatggcgcatacaaagagaagcgacctcgcgagagcaagcggacctcataaagtgcgtcgtagtccggattggagtctgcaactcgactccatgaagtcggaatcgctagtaatcgtagatcagaatgctacggtgaatacgttcccgggccttgtacacaccgcccgtcacaccatgggagtgggttgcaaaagaagtaggtagcttaaccttcgggagggcgcttaccactttgtgattcatgactggggtgaagtcgtaacaaggtaaccgtaggggaacc

SEQ ID NO: 48670 - DNA, 1501 bp, Cedecea neteri
gcaggttcccctacggttaccttgttacgacttcaccccagtcatgaatcacaaagtggtaagcgccctcccgaaggttaagctacctacttcttttgcaacccactcccatggtgtgacgggcggtgtgtacaaggcccgggaacgtattcaccgtagcattctgatctacgattactagcgattccgacttcatggagtcgagttgcagactccaatccggactacgacgcactttatgaggtccgcttgctctcgcgaggtcgcttctctttgtatgcgccattgtagcacgtgtgtagccctactcgtaagggccatgatgacttgacgtcatccccaccttcctccagtttatcactggcagtctcctttgagttcccggccgaaccgctggcaacaaaggataagggttgcgctcgttgcgggacttaacccaacatttcacaacacgagctgacgacagccatgcagcacctgtctcagagttcccgaaggcaccaatccatctctggaaagttctctggatgtcaagagtaggtaaggttcttcgcgttgcatcgaattaaaccacatgctccaccgcttgtgcgggcccccgtcaattcatttgagttttaaccttgcggccgtactccccaggcggtcgacttaacgcgttagctccggaagccacgcctcaagggcacaacctccaagtcgacatcgtttacggcgtggactaccagggtatctaatcctgtttgctccccacgctttcgcacctgagcgtcagtctttgtccagggggccgccttcgccaccggtattcctccagatctctacgcatttcaccgctacacctggaattctacccccctctacaagactcaagcttgccagtttcgaatgcagttcccaggttgagcccggggatttcacatccgacttaacaaaccgcctgcgtgcgctttacgcccagtaattccgattaacgcttgcaccctccgtattaccgcggctgctggcacggagttagccggtgcttcttctgcgagtaacgtcaatcgctaaggttattaaccttaatgccttcctcctcgctgaaagtactttacaacccgaaggccttcttcatacacgcggcatggctgcatcaggcttgcgcccattgtgcaatattccccactgctgcctcccgtaggagtctggaccgtgtctcagttccagtgtggctggtcatcctctcagaccagctagggatcgtcgcctaggtgagccattacctcacctactagctaatcccatctgggttcatctgatggcaagaggcccgaaggtccccctctttggtcttgcgacgttatgcggtattagctaccgtttccagtagttatccccctccatcaggcagatccccagacattactcacccgtccgccgctcgtcacccagagagcaagctctcccgtgctaccgctcgacttgcatgtgttaggcctgccgccagcgttcaatctga

SEQ ID NO: 48671 - DNA, 1530 bp, Citrobacter youngae
tagagtttgatcatggctcagattgaacgctggcggcaggcctaacacatgcaagtcgaacggtagcacagaggagcttgctccttgggtgacgagtggcggacgggtgagtaatgtctgggaaactgcccgatggagggggataactactggaaacggtagctaataccgcataacgtcgcaagaccaaagagggggaccttcgggcctcttgccatcggatgtgcccagatgggattagctagtaggtggggtaacggctcacctaggcgacgatccctagctggtctgagaggatgaccagccacactggaactgagacacggtccagactcctacgggaggcagcagtggggaatattgcacaatgggcgcaagcctgatgcagccatgccgcgtgtatgaagaaggccttcgggttgtaaagtactttcagcgaggaggaaggcgttgaggttaataacctcagcaattgacgttactcgcagaagaagcaccggctaactccgtgccagcagccgcggtaatacggagggtgcaagcgttaatcggaattactgggcgtaaagcgcacgcaggcggtctgtcaagtcggatgtgaaatccccgggctcaacctgggaactgcatccgaaactggcaggctagagtcttgtagaggggggtagaattccaggtgtagcggtgaaatgcgtagagatctggaggaataccggtggcgaaggcggccccctggacaaagactgacgctcaggtgcgaaagcgtggggagcaaacaggattagataccctggtagtccacgccgtaaacgatgtcgacttggaggttgtgcccttgaggcgtggcttccggagctaacgcgttaagtcgaccgcctggggagtacggccgcaaggttaaaactcaaatgaattgacgggggcccgcacaagcggtggagcatgtggtttaattcgatgcaacgcgaagaaccttacctactcttgacatccagagaacttagcagagatgctttggtgccttcgggaactctgagacaggtgctgcatggctgtcgtcagctcgtgttgtgaaatgttgggttaagtcccgcaacgagcgcaacccttatcctttgttgccagcggtccggccgggaactcaaaggagactgccagtgataaactggaggaaggtggggatgacgtcaagtcatcatggcccttacgagtagggctacacacgtgctacaatggcgcatacaaagagaagcgacctcgcgagagcaagcggacctcataaagtgcgtcgtagtccggattggagtctgcaactcgactccatgaagtcggaatcgctagtaatcgtggatcagaatgccacggtgaatacgttcccgggccttgtacacaccgcccgtcacaccatgggagtgggttgcaaaagaagtaggtagcttaaccttcgggagggcgcttaccactttgtgattcatgactggggtgaagtcgtaacaaggtaaccgtaggggaacctgcggttggatcacc

SEQ ID NO: 48672 - DNA, 1481 bp, Citrobacter youngae
cctaacacatgcaagtcgaacggtagcacagaggagcttgctccttgggtgacgagtggcggacgggtgagtaatgtctgggaaactgcccgatggagggggataactactggaaacggtagctaataccgcataacgtcgcaagaccaaagagggggaccttcgggcctcttgccatcggatgtgcccagatgggattagctagtaggtggggtaacggctcacctaggcgacgatccctagctggtctgagaggatgaccagccacactggaactgagacacggtccagactcctacgggaggcagcagtggggaatattgcacaatgggcgcaagcctgatgcagccatgccgcgtgtatgaagaaggccttcgggttgtaaagtactttcagcgaggaggaaggcgttgaggttaataaccttagcaattgacgttactcgcagaagcaagcaccggctaactccggccagcagccgcggtaatacggagggtgcaagcgttaatcggaattactgggcgtaaagcgcacgcaggcggtctgtcaagtcggatgtgaaatccccgggctcaacctgggaactgcatccgaaactggcaggctagagtcttgtagaggggggtagaattccaggtgtagcggtgaaatgcgtagagatctggaggaataccggtggcgaaggcggccccctggacaaagactgacgctcaggtgcgaaagcgtggggagcaaacaggattagataccctggtagtccacgccgtaaacgatgtcgacttggaggttgtgcccttgaggcgtggcttccggagctaacgcgttaagtcgaccgcctggggagtacggccgcaaggttaaaactcaaatgaattgacgggggcccgcacaagcggtggagcatgtggtttaattcgatgcaacgcgaagaaccttacctactcttgacatccagagaactttccagagatggattggtgccttcgggaactctgagacaggtgctgcatggctgtcgtcagctcgtgttgtgaaatgttgggttaagtcccgcaacgagcgcaacccttatcctttgttgccagcggttcggccgggaactcaaaggagactgccagtgataaactggaggaaggtggggatgacgtcaagtcatcatggcccttacgagtagggctacacacgtgctacaatggcgcatacaaagagaagcgacctcgcgagagcaagcggacctcataaagtgcgtcgtagtccggattggagtctgcaactcgactccatgaagtcggaatcgctagtaatcgtggatcagaatgccacggtgaatacgttcccgggccttgtacacaccgcccgtcacaccatgggagtgggttgcaaaagaagtaggtagcttaaccttcgggagggcgcttaccactttgtgattcatgactggggtgaagtcgtaacaaggtaaccgtaggggaaccctgcgg

SEQ ID NO: 48673 - DNA, 1453 bp, Bacteroides capilosus
gatgaacgctagctacaggcttaacacatgcaagtcgcggggcagcatggagggttgcttgcaacctttgatggcgaccggcgcacgggtgagtaacacgtatccaacctactccttacaacggaataacccggcgaaagtcggactaataccgtatgatatcctatgcaggcatctaactaggattaaaggtttagcggtaagggatggggatgcgtctgattaggcagttggcggggtaacggcccaccaaaccgacgatcagtaggggttctgagaggaaggtcccccacattggaactgagacacggtccaaactcctacgggaggcagcagtgaggaatattggtcaatggacggaagtctgaaccagccaagtagcgtgcaggatgacggccctatgggttgtaaactgcttttatacggggataaagttagggacgtgtccctatttgcaggtaccgtatgaataaggaccggctaattccgtgccagcagccgcggtaatacggaaggtccgggcgttatccggatttattgggtttaaagggagcgtaggccgtagattaagtgtgttgtgaaatgtagacgctcaacgtctgacttgcagcgcatactggtttacttgagtttgcacaacgttggcggaattcgtcgtgtagcggtgaaatgcttagatatgacgaagaactccgattgcgaaggcagcttgcgggagcaaaactgacgctgaagctcgaaagtgcgggtatcgaacaggattagataccctggtagtccgcacggtaaacgatggatgcccgttgtatggcctttcggctatgtgaccaagcgaaagcattaagcatcccacctggggagtacgccggcaacggtgaaactcaaaggaattgacgggggcccgcacaagcggaggaacatgtggtttaattcgatgatacgcgaggaaccttacccgggcttgaactgtaggcgaacgatctagagatagtgaggcccttcggggcgcctacggaggtgctgcatggttgtcgtcagctcgtgccgtgaggtgtcggcttaagtgccataacgagcgcaacccctgttctcagttgccatcgggtgatgccgggcactctgaggatactgcctccgcaaggagtgaggaaggtggggatgacgtcaaatcagcacggcccttacgtccggggctacacacgtgttacaatggccggtacagagcgtcggtcgtatgcaaatacgatctaatctttaaaaccggtctcagttcggactggggtctgcaacccgaccccacgaagctggattcgctagtaatcgcgcatcagccatggcgcggtgaatacgttcccgggccttgtacacaccgcccgtcaagccatgaaagccgggggcgcctgaagtccgcgaccgcaaggaacggcctagggcgaaactggtgattggggct

SEQ ID NO: 48674 - DNA, 1484 bp, Bacteroides capilosus
gatgaacgctggcggcgtgcttaacacatgcaagtcgaacggagagctcatgacagaggattcgtccaatggattgggtttcttagtggcggacgggtgagtaacgcgtgaggaacctgcctcggagtggggaataacagtccgaaaggactgctaataccgcataatgcagctgagtcgcatgacactggctgccaaagatttatcgctctgagatggcctcgcgtctgattagctagttggcggggtaacggcccaccaaggcgacgatcagtagccggactgagaggttggccggccacattgggactgagacacggcccagactcctacgggaggcagcagtggggaatattgggcaatgggcgcaagcctgacccagcaacgccgcgtgaaggatgaaggctttcgggttgtaaacttcttttatcagggacgaaataaatgacggtacctgatgaataagccacggctaactacgtgccagcagccgcggtaatacgtaggtggcaagcgttatccggatttactgggtgtaaagggcgtgtaggcgggactgcaagtcaggtgtgaaaaccacgggctcaacctgtggcctgcatttgaaactgtagttcttgagtgctggagaggcaatcggaattccgtgtgtagcggtgaaatgcgtagatatacggaggaacaccagtggcgaaggcggattgctggacagtaactgacgctgaggcgcgaaagcgtggggagcaaacaggattagataccctggtagtccacgccgtaaacgatggatactaggtgtggggggactgaccccctccgtgccgcagttaacacaataagtatcccacctggggagtacgatcgcaaggttgaaactcaaaggaattgacgggggcccgcacaagcggtggagtatgtggtttaattcgaagcaacgcgaagaaccttaccagggcttgacatccgactaacgaagcagagatgcattaggtgcccttcggggaaagtcgagacaggtggtgcatggttgtcgtcagctcgtgtcgtgagatgttgggttaagtcccgcaacgagcgcaacccttattgttagttgctacgcaagagcactctagcgagactgccgttgacaaaacggaggaaggtggggacgacgtcaaatcatcatgccccttatgtcctgggccacacacgtactacaatggtggttaacagagggaagcaatgccgcgaggtggagcaaatccctaaaagccatcccagttcggattgcaggctgaaacccgcctgtatgaagttggaatcgctagtaatcgcggatcagcatgccgcggtgaatacgttcccgggccttgtacacaccgcccgtcacaccatgagagtcgggaacacccgaagtccgtagcctaaccgcaaggagggcgcggccgaaggtgggttcgataattggggtgaagtcgtaacaaggtagccgtatcggaagg

SEQ ID NO: 48675 - DNA, 1495 bp, Proteus penneri
attgaacgctggcggcaggcctaacacatgcaagtcgagcggtaacagaagaaagcttgctttcttgctgacgagcggcggacgggtgagtaatgtatggggatctgcccgatagagggggataactactggaaacggtggctaataccgcatgacgtctacggaccaaagcaggggctcttcggaccttgcgctatcggatgaacccatatgggattagctagtaggtgaggtaaaggctcacctaggcgacgatctctagctggtctgagaggatgatcagccacactgggactgagacacggcccagactcctacgggaggcagcagtggggaatattgcacaatgggcgcaagcctgatgcagccatgccgcgtgtatgaagaaggccttagggttgtaaagtactttcagcggggaggaaggtgataaagttaatacctttatcaattgacgttacccgcagaagaagcaccggctaactccgtgccagcagccgcggtaatacggagggtgcaagcgttaatcggaattactgggcgtaaagcgcacgcaggcggtcaattaagtcagatgtgaaagccccgagcttaacttgggaattgcatctgaaactggttggctagagtcttgtagaggggggtagaattccatgtgtagcggtgaaatgcgtagagatgtggaggaataccggtggcgaaggcggccccctggacaaagactgacgctcaggtgcgaaagcgtggggagcaaacaggattagataccctggtagtccacgctgtaaacgatgtcgatttagaggttgtggtcttgaaccgtggcttctggagctaacgcgttaaatcgaccgcctggggagtacggccgcaaggttaaaactcaaatgaattgacgggggcccgcacaagcggtggagcatgtggtttaattcgatgcaacgcgaagaaccttacctactcttgacatccagcgaatcctttagagatagaggagtgccttcgggaacgctgagacaggtgctgcatggctgtcgtcagctcgtgttgtgaaatgttgggttaagtcccgcaacgagcgcaacccttatcctttgttgccagcgcgtgatggcgggaactcaaaggagactgccggtgataaaccggaggaaggtggggatgacgtcaagtcatcatggcccttacgagtagggctacacacgtgctacaatggcagatacaaagagaagcgacctcgcgagagcaagcggaactcataaagtctgtcgtagtccggattggagtctgcaactcgactccatgaagtcggaatcgctagtaatcgtagatcagaatgctacggtgaatacgttcccgggccttgtacacaccgcccgtcacaccatgggagtgggttgcaaaagaagtaggtagcttaaccttcgggagggcgcttaccactttgtgattcatgactggggtgaagtcgtaacaaggtaaccgtaggggaacc

SEQ ID NO: 48676 - DNA, 1494 bp, Enterobacter hormaechei
attgaacgctggcggcaggcctaacacatgcaagtcgaacggtaacaggaagcagcttgctgcttcgctgacgagtggcggacgggtgagtaatgtctgggaaactgcctgatggagggggataactactggaaacggtagctaataccgcataacgtcgcaagaccaaagagggggaccttcgggcctcttgccatcggatgtgcccagatgggattagctagtaggtggggtaacggctcacctaggcgacgatccctagctggtctgagaggatgaccagccacactggaactgagacacggtccagactcctacgggaggcagcagtggggaatattgcacaatgggcgcaagcctgatgcagccatgccgcgtgtatgaagaaggccttcgggttgtaaagtactttcagcggggaggaaggcgatgaggttaataacctcagcaattgacgttacccgcagaagaagcaccggctaactccgtgccagcagccgcggtaatacggagggtgcaagcgttaatcggaattactgggcgtaaagcgcacgcaggcggtctgtcaagtcggatgtgaaatccccgggctcaacctgggaactgcattcgaaactggcaggctagagtcttgtagaggggggtagaattccaggtgtagcggtgaaatgcgtagagatctggaggaataccggtggcgaaggcggccccctggacaaagactgacgctcaggtgcgaaagcgtggggagcaaacaggattagataccctggtagtccacgccgtaaacgatgtcgacttggaggttgtgcccttgaggcgtggcttccggagctaacgcgttaagtcgaccgcctggggagtacggccgcaaggttaaaactcaaatgaattgacgggggcccgcacaagcggtggagcatgtggtttaattcgatgcaacgcgaagaaccttacctactcttgacatccagagaacttagcagagatgctttggtgccttcgggaactctgagacaggtgctgcatggctgtcgtcagctcgtgttgtgaaatgttgggttaagtcccgcaacgagcgcaacccttatcctttgttgccagcggttaggccgggaactcaaaggagactgccagtgataaactggaggaaggtggggatgacgtcaagtcatcatggcccttacgagtagggctacacacgtgctacaatggcgcatacaaagagaagcgacctcgcgagagcaagcggacctcataaagtgcgtcgtagtccggattggagtctgcaactcgactccatgaagtcggaatcgctagtaatcgtggatcagaatgccacggtgaatacgttcccgggccttgtacacaccgcccgtcacaccatgggagtgggttgcaaaagaagtaggtagcttaaccttcgggagggcgcttaccactttgtgattcatgactggggtgaagtcgtaacaaggtaaccgtaggggaacc

SEQ ID NO: 48677 - DNA, 1507 bp, Providencia rettgeri
catggctcagattgaacgctggcggcaggcctaacacatgcaagtcgagcggtaacaggggaagcttgcttctcgctgacgagcggcggacgggtgagtaatgtatggggatctgcccgatagagggggataaccactggaaacggtggctaataccgcataatctctaaggagcaaagcaggggaacttcggtccttgcgctatcggatgaacccatatgggattagctagtaggtgaggtaatggctcacctaggcgacgatccctagctggtctgagaggatgatcagccacactgggactgagacacggcccagactcctacgggaggcagcagtggggaatattgcacaatgggcgcaagcctgatgcagccatgccgcgtgtatgaagaaggccctagggttgtaaagtactttcagtcgggaggaaggcgttgatgctaatatcatcaacgattgacgttaccgacagaagaagcaccggctaactccgtgccagcagccgcggtaatacggagggtgcaagcgttaatcggaattactgggcgtaaagcgcacgcaggcggttgattaagttagatgtgaaatccccgggcttaacctgggaatggcatctaagactggtcagctagagtcttgtagaggggggtagaattccatgtgtagcggtgaaatgcgtagagatgtggaggaataccggtggcgaaggcggccccctggacaaagactgacgctcaggtgcgaaagcgtggggagcaaacaggattagataccctggtagtccacgctgtaaacgatgtcgatttggaggttgttccctagaggagtggcttccggagctaacgcgttaaatcgaccgcctggggagtacggccgcaaggttaaaactcaaatgaattgacgggggcccgcacaagcggtggagcatgtggtttaattcgatgcaacgcgaagaaccttacctactcttgacatccagagaacttagcagagatgctttggtgccttcgggaactctgagacaggtgctgcatggctgtcgtcagctcgtgttgtgaaatgttgggttaagtcccgcaacgagcgcaacccttatcctttgttgccagcgatacggtcgggaactcaaaggagactgccggtgataaaccggaggaaggtggggatgacgtcaagtcatcatggcccttacgagtagggctacacacgtgctacaatggcgtatacaaagagaagcgacctcgcgagagcaagcggaactcataaagtacgtcgtagtccggattggagtctgcaactcgactccatgaagtcggaatcgctagtaatcgtagatcagaatgctacggtgaatacgttcccgggccttgtacacaccgcccgtcacaccatgggagtgggttgcaaaagaagtaggtagcttaaccttcgggagggcgcttaccactttgtgattcatgactggggtgaagtcgtaacaaggtaaccgtaggggaacctgcgg

SEQ ID NO: 48678 - DNA, 1535 bp, Proteus penneri
agagtttgatcatggctcagattgaacgctggcggcaggcctaacacatgcaagtcgagcggtaacagaagaaagcttgctttcttgctgacgagcggcggacgggtgagtaatgtatggggatctgcccgatagagggggataactactggaaacggtggctaataccgcatgacgtctacggaccaaagcaggggctcttcggaccttgcgctatcggatgaacccatatgggattagctagtaggtgaggtaaaggctcacctaggcgacgatctctagctggtctgagaggatgatcagccacactgggactgagacacggcccagactcctacgggaggcagcagtggggaatattgcacaatgggcgcaagcctgatgcagccatgccgcgtgtatgaagaaggccttagggttgtaaagtactttcagcggggaggaaggtgataaagttaatacctttatcaattgacgttacccgcagaagaagcaccggctaactccgtgccagcagccgcggtaatacggagggtgcaagcgttaatcggaattactgggcgtaaagcgcacgcaggcggtcaattaagtcagatgtgaaagccccgagcttaacttgggaattgcatctgaaactggttggctagagtcttgtagaggggggtagaattccatgtgtagcggtgaaatgcgtagagatgtggaggaataccggtggcgaaggcggccccctggacaaagactgacgctcaggtgcgaaagcgtggggagcaaacaggattagataccctggtagtccacgctgtaaacgatgtcgatttagaggttgtggtcttgaaccgtggcttctggagctaacgcgttaaatcgaccgcctggggagtacggccgcaaggttaaaactcaaatgaattgacgggggcccgcacaagcggtggagcatgtggtttaattcgatgcaacgcgaagaaccttacctactcttgacatccagcggatcctttagagatagaggagtgccttcgggaacgctgagacaggtgctgcatggctgtcgtcagctcgtgttgtgaaatgttgggttaagtcccgcaacgagcgcaacccttatcctttgttgccagcgcgtgatggcgggaactcaaaggagactgccggtgataaaccggaggaaggtggggatgacgtcaagtcatcatggcccttacgagtagggctacacacgtgctacaatggcagatacaaagagaagcgacctcgcgagagcaagcggaactcataaagtctgtcgtagtccggattggagtctgcaactcgactccatgaagtcggaatcgctagtaatcgtagatcagaatgctacggtgaatacgttcccgggccttgtacacaccgcccgtcacaccatgggagtgggttgcaaaagaagtaggtagcttaaccttcgggagggcgcttaccactttgtgattcatgactggggtgaagtcgtaacaaggtaaccgtaggggaacctgcggttggatcacctcctt

SEQ ID NO: 48679 - DNA, 1486 bp, Enterobacter hormaechei
ggcggcaggcctaacacatgcaagtcgaacggtaacaggaagcagcttgctgctttgctgacgagtggcggacgggtgagtaatgtctgggaaactgcctgatggagggggataactactggaaacggtagctaataccgcataacgtcgcaagaccaaagagggggaccttcgggcctcttgccatcggatgtgcccagatgggattagctagtaggtggggtaacggctcacctaggcgacgatccctagctggtctgagaggatgaccagccacactggaactgagacacggtccagactcctacgggaggcagcagtggggaatattgcacaatgggcgcaagcctgatgcagccatgccgcgtgtatgaagaaggccttcgggttgtaaagtactttcagcggggaggaaggcgataaggttaataaccttgtcgattgacgttacccgcagaagaagcaccggctaactccgtgccagcagccgcggtaatacggagggtgcaagcgttaatcggaattactgggcgtaaagcgcacgcaggcggtctgtcaagtcggatgtgaaatccccgggctcaacctgggaactgcattcgaaactggcaggctagagtcttgtagaggggggtagaattccaggtgtagcggtgaaatgcgtagagatctggaggaataccggtggcgaaggcggccccctggacaaagactgacgctcaggtgcgaaagcgtggggagcaaacaggattagataccctggtagtccacgccgtaaacgatgtcgacttggaggttgtgcccttgaggcgtggcttccggagctaacgcgttaagtcgaccgcctggggagtacggccgcaaggttaaaactcaaatgaattgacgggggcccgcacaagcggtggagcatgtggtttaattcgatgcaacgcgaagaaccttacctactcttgacatccagagaacttagcagagatgctttggtgccttcgggaactctgagacaggtgctgcatggctgtcgtcagctcgtgttgtgaaatgttgggttaagtcccgcaacgagcgcaacccttatcctttgttgccagcggttaggccgggaactcaaaggagactgccagtgataaactggaggaaggtggggatgacgtcaagtcatcatggcccttacgagtagggctacacacgtgctacaatggcgcatacaaagagaagcgacctcgcgagagcaagcggacctcataaagtgcgtcgtagtccggattggagtctgcaactcgactccatgaagtcggaatcgctagtaatcgtggatcagaatgccacggtgaatacgttcccgggccttgtacacaccgcccgtcacaccatgggagtgggttgcaaaagaagtaggtagcttaaccttcgggagggcgcttaccactttgtgattcatgactggggtgaagtcgtaacaaggaaccgtaggggaacctgc

SEQ ID NO: 48680 - DNA, 1510 bp, Moellerella wisconsensis
catggctcagattgaacgctggcggcaggcctaacacatgcaagtcgagcggtaacaggaagaagcttgcttctttgctgacgagcggcggacgggtgagtaatgtatggggatctgcctgacagagggggataactactggaaacggtagctaataccgcataatctctaaggagcaaagcaggggaccttcgggccttgcgctgtcggatgaacccatatgggattagctagtaggtggggtaatggctcacctaggcgacgatctctagctggtctgagaggatgatcagccacactgggactgagacacggcccagactcctacgggaggcagcagtggggaatattgcacaatgggcgcaagcctgatgcagccatgccgcgtgtatgaagaaggccttagggttgtaaagtactttcagtcgggaggaaggcgttgatattaatactatcagcgattgacgttaccgacagaagaagcaccggctaactccgtgccagcagccgcggtaatacggggggtgcaagcgttaatcggaattactgggcgtaaagcgcacgcaggcggttgattaagttagatgtgaaatccccgggcttaacctgggaatggcatctaaaactggtcagctagagtcttgtagaggggggtagaattccatgtgtagcggtgaaatgcgtagagatgtggaggaataccggtggcgaaggcggccccctggacaaagactgacgctcaggtgcgaaagcgtggggagcaaacaggattagataccctggtagtccacgctgtaaacgatgtcgatttggaggttgttcccttgaggagtggcttccggagctaacgcgttaaatcgaccgcctggggagtacggccgcaaggttaaaactcaaatgaattgacgggggcccgcacaagcggtggagcatgtggtttaattcgatgcaacgcgaagaaccttacctactcttgacatccagagaatttagcagagatgctttagtgccttcgggaactctgagacaggtgctgcatggctgtcgtcagctcgtgttgtgaaatgttgggttaagtcccgcaacgagcgcaacccttatcctttgttgccagcacgtaatggtgggaactcaagggagactgccggtgataaaccggaggaaggtggggatgacgtcaagtcatcatggcccttacgagtagggctacacacgtgctacaatggcgcatacaaagagaagcgaactcgcgagagccagcggaactcataaagtgcgtcgtagtccggattggagtctgcaactcgactccatgaagtcggaatcgctagtaatcgtagatcagaatgctacggtgaatacgttcccgggccttgtacacaccgcccgtcacaccatgggagtgggttgcaaaagaagtaggtagcttaaccttcgggggggcgcttaccactttgtgattcatgactggggtgaagtcgtaacaaggtaaccgtaggggaacctgcgg

SEQ ID NO: 48681 - DNA, 1494 bp, Pantoea dispersa
attgaacgctggcggcaggcctaacacatgcaagtcgaacggcagcacagaagagcttgctctttgggtggcgagtggcggacgggtgagtaatgtctgggaaactgcccgatggagggggataactactggaaacggtagctaataccgcataacgtcgcaagaccaaagtgggggaccttcgggcctcacaccatcggatgtgcccagatgggattagctagtaggtggggtaatggctcacctaggcgacgatccctagctggtctgagaggatgaccagccacactggaactgagacacggtccagactcctacgggaggcagcagtggggaatattgcacaatgggcgcaagcctgatgcagccatgccgcgtgtatgaagaaggccttcgggttgtaaagtactttcagcggggaggaaggcggtgaggttaataacctcgccgattgacgttacccgcagaagaagcaccggctaactccgtgccagcagccgcggtaatacggagggtgcaagcgttaatcggaattactgggcgtaaagcgcacgcaggcggtctgttaagtcagatgtgaaatccccgggcttaacctgggaactgcatttgaaactggcaggcttgagtctcgtagaggggggtagaattccaggtgtagcggtgaaatgcgtagagatctggaggaataccggtggcgaaggcggccccctggacgaagactgacgctcaggtgcgaaagcgtggggagcaaacaggattagataccctggtagtccacgccgtaaacgatgtcgacttggaggttgtgcccttgaggcgtggcttccggagctaacgcgttaagtcgaccgcctggggagtacggccgcaaggttaaaactcaaatgaattgacgggggcccgcacaagcggtggagcatgtggtttaattcgatgcaacgcgaagaaccttacctggccttgacatccagagaacttagcagagatgctttggtgccttcgggaactctgagacaggtgctgcatggctgtcgtcagctcgtgttgtgaaatgttgggttaagtcccgcaacgagcgcaacccttatcctttgttgccagcggttcggccgggaactcaaaggagactgccggtgataaaccggaggaaggtggggatgacgtcaagtcatcatggcccttacggccagggctacacacgtgctacaatggcgcatacaaagagaagcgacctcgcgagagcaagcggacctcataaagtgcgtcgtagtccggattggagtctgcaactcgactccatgaagtcggaatcgctagtaatcgtagatcagaatgctacggtgaatacgttcccgggccttgtacacaccgcccgtcacaccatgggagtgggttgcaaaagaagtaggtagcttaaccttcgggagggcgcttaccactttgtgattcatgactggggtgaagtcgtaacaaggtaaccgtaggggaacc

SEQ ID NO: 48682 - DNA, 1510 bp, Moellerella wisconsensis
catggctcagattgaacgctggcggcaggcctaacacatgcaagtcgagcggtaacaggaaggagcttgcttctttgctgacgagcggcggacgggtgagtaatgtatggggatctgcctgacagagggggataactactggaaacggtagctaataccgcataatctctaaggagcaaagcaggggaccttcgggccttgcgctgtcggatgaacccatatgggattagctagtaggtgaggtaatggctcacctaggcgacgatctctagctggtctgagaggatgatcagccacactgggactgagacacggcccagactcctacgggaggcagcagtggggaatattgcacaatgggcgcaagcctgatgcagccatgccgcgtgtatgaagaaggccttagggttgtaaagtactttcagtcgggaggaaggcgttgatactaatactatcagcgattgacgttaccgacagaagaagcaccggctaactccgtgccagcagccgcggtaatacggggggtgcaagcgttaatcggaattactgggcgtaaagcgcacgcaggcggttgattaagttagatgtgaaatccccgggcttaacctgggaatggcatctaaaactggtcagctagagtcttgtagaggggggtagaattccatgtgtagcggtgaaatgcgtagagatgtggaggaataccggtggcgaaggcggccccctggacaaagactgacgctcaggtgcgaaagcgtggggagcaaacaggattagataccctggtagtccacgctgtaaacgatgtcgatttggaggttgttcccttgaggagtggcttccggagctaacgcgttaaatcgaccgcctggggagtacggccgcaaggttaaaactcaaatgaattgacgggggcccgcacaagcggtggagcatgtggtttaattcgatgcaacgcgaagaaccttacctactcttgacatccagagaatttagcagagatgctttagtgccttcgggaactctgagacaggtgctgcatggctgtcgtcagctcgtgttgtgaaatgttgggttaagtcccgcaacgagcgcaacccttatcctttgttgccagcacgtaatggtgggaactcaagggagactgccggtgataaaccggaggaaggtggggatgacgtcaagtcatcatggcccttacgagtagggctacacacgtgctacaatggcgcatacaaagagaagcgaactcgcgagagccagcggaactcataaagtgcgtcgtagtccggattggagtctgcaactcgactccatgaagtcggaatcgctagtaatcgtagatcagaatgctacggtgaatacgttcccgggccttgtacacaccgcccgtcacaccatgggagtgggttgcaaaagaagtaggtagcttaaccttcgggggggcgcttaccactttgtgattcatgactggggtgaagtcgtaacaaggtaaccgtaggggaacctgcgg

SEQ ID NO: 48683 - DNA, 1493 bp, Pantoea dispersa
attgaacgctggcggcaggcctaacacatgcaagtcgaacggcagcacagaagagcttgctctttgggtggcgagtggcggacgggtgagtaatgtctgggaaactgcccgatggagggggataactactggaaacggtagctaataccgcataacgtcgcaagaccaaagtgggggaccttcgggcctcacaccatcggatgtgcccagatgggattagctagtaggtggggtaatggctcacctaggcgacgatccctagctggtctgagaggatgaccagccacactggaactgagacacggtccagactcctacgggaggcagcagtggggaatattgcacaatgggcgcaagcctgatgcagccatgccgcgtgtatgaagaaggccttcgggttgtaaagtactttcagcggggaggaaggcggtgaggttaataaccttgccgattgacgttacccgcagaagaagcaccggctaactccgtgccagcagccgcggtaatacggagggtgcaagcgttaatcggaattactgggcgtaaagcgcacgcaggcggtctgttaagtcagatgtgaaatccccgggcttaacctgggaactgcatttgaaactggcaggcttgagtctcgtagaggggggtagaattccaggtgtagcggtgaaatgcgtagagatctggaggaataccggtggcgaaggcggccccctggacgaagactgacgctcaggtgcgaaagcgtggggagcaaacaggattagataccctggtagtccacgccgtaaacgatgtcgacttggaggttgtgcccttgaggcgtggcttccggagctaacgcgttaagtcgaccgcctggggagtacggccgcaaggttaaaactcaaatgaattgacgggggcccgcacaagcggtggagcatgtggtttaattcgatgcaacgcgaagaaccttacctggccttgacatccagagaacttagcagagatgctttggtgccttcgggaactctgagacaggtgctgcatggctgtcgtcagctcgtgttgtgaaatgttgggttaagtcccgcaacgagcgcaacccttatcctttgttgccagcggttcggccgggaactcaaaggagactgccggtgataaaccggaggaaggtggggatgacgtcaagtcatcatggcccttacggccagggctacacacgtgctacaatggcgcatacaaagagaagcgacctcgcgagagcaagcggacctcataaagtgcgtcgtagtccggattggagtctgcaactcgactccatgaagtcggaatcgctagtaatcgtagatcagaatgctacggtgaatacgttcccgggccttgtacacaccgcccgtcacaccatgggagtgggttgcaaaagaagtaggtagcttaaccttcgggagggcgcttaccactttgtgattcatgactggggtgaagtcgtaacaaggtaaccgtaggggaac

SEQ ID NO: 48684 - DNA, 1508 bp, Providencia rustigianii
catggctcagattgaacgctggcggcaggcctaacacatgcaagtcgagcggtaacaggggaagcttgcttctcgctgacgagcggcggacgggtgagtaatgtatggggatctgcccgatagagggggataactactggaaacggtagctaataccgcataatctctttggagcaaagcaggggaacttcggtccttgcgctatcggatgaacccatatgggattagctagttggtggggtaatggctcaccaaggcgacgatccctagctggtctgagaggatgatcagccacactgggactgagacacggcccagactcctacgggaggcagcagtggggaatattgcacaatgggcgcaagcctgatgcagccatgccgcgtgtatgaagaaggccttagggttgtaaagtactttcagttgggaggaaggcgttgatgctaatatcatcagcgattgacgttaccaacagaagaagcaccggctaactccgtgccagcagccgcggtaatacggagggtgcaagcgttaatcggaattactgggcgtaaagcgcacgcaggcggttgattaagttagatgtgaaatccccgggcttaacctgggaatggcatctaagactggtcagctagagtcttgtagaggggggtagaattccatgtgtagcggtgaaatgcgtagagatgtggaggaataccggtggcgaaggcggccccctggacaaagactgacgctcaggtgcgaaagcgtggggagcaaacaggattagataccctggtagtccacgctgtaaacgatgtcgatttggaggttgttcccttgaggagtggcttccggagctaacgcgttaaatcgaccgcctggggagtacggccgcaaggttaaaactcaaatgaattgacgggggcccgcacaagcggtggagcatgtggtttaattcgatgcaacgcgaagaaccttacctactcttgacatccagagaatttagcagagatgctttagtgccttcgggaactctgagacaggtgctgcatggctgtcgtcagctcgtgttgtgaaatgttgggttaagtcccgcaacgagcgcaacccttatcctttgttgccagcacgtcatggtgggaactcaaaggagactgccggtgataaaccggaggaaggtggggatgacgtcaagtcatcatggcccttacgagtagggctacacacgtgctacaatggcgtatacaaagagaagcgacctcgcgagagcaagcggaactcataaagtacgtcgtagtccggattggagtctgcaactcgactccatgaagtcggaatcgctagtaatcgtagatcagaatgctacggtgaatacgttcccgggccttgtacacaccgcccgtcacaccatgggagtgggttgcaaaagaagtaggtagcttaaccttcgggagggcgcttaccactttgtgattcatgactggggtgaagtcgtaacaaggtaaccgtaggggaacctgcgg

SEQ ID NO: 48685 - DNA, 1508 bp, Providencia rustigianii
catggctcagattgaacgctggcggcaggcctaacacatgcaagtcgagcggtaacaggagaagcttgcttctcgctgacgagcggcggacgggtgagtaatgtatggggatctgcccgatagagggggataactactggaaacggtagctaataccgcataatctctcaggagcaaagcaggggaacttcggtccttgcgctatcggatgaacccatatgggattagctagttggtggggtaatggctcaccaaggcgacgatccctagctggtctgagaggatgatcagccacactgggactgagacacggcccagactcctacgggaggcagcagtggggaatattgcacaatgggcgcaagcctgatgcagccatgccgcgtgtatgaagaaggccttagggttgtaaagtactttcagttgggaggaaggcgttgatgctaatatcgtcaacgattgacgttaccaacagaagaagcaccggctaactccgtgccagcagccgcggtaatacggagggtgcaagcgttaatcggaattactgggcgtaaagcgcacgcaggcggttgattaagttagatgtgaaatccccgggcttaacctgggaatggcatctaagactggtcagctagagtcttgtagaggggggtagaattccatgtgtagcggtgaaatgcgtagagatgtggaggaataccggtggcgaaggcggccccctggacaaagactgacgctcaggtgcgaaagcgtggggagcaaacaggattagataccctggtagtccacgctgtaaacgatgtcgatttggaggttgttcccttgaggagtggcttccggagctaacgcgttaaatcgaccgcctggggagtacggccgcaaggttaaaactcaaatgaattgacgggggcccgcacaagcggtggagcatgtggtttaattcgatgcaacgcgaagaaccttacctactcttgacatccagagaatttagcagagatgctttagtgccttcgggaactctgagacaggtgctgcatggctgtcgtcagctcgtgttgtgaaatgttgggttaagtcccgcaacgagcgcaacccttatcctttgttgccagcacgtcatggtgggaactcaaaggagactgccggtgataaaccggaggaaggtggggatgacgtcaagtcatcatggcccttacgagtagggctacacacgtgctacaatggcgtatacaaagagaagcgacctcgcgagagcaagcggaactcataaagtacgtcgtagtccggattggagtctgcaactcgactccatgaagtcggaatcgctagtaatcgtagatcagaatgctacggtgaatacgttcccgggccttgtacacaccgcccgtcacaccatgggagtgggttgcaaaagaagtaggtagcttaaccttcgggagggcgcttaccactttgtgattcatgactggggtgaagtcgtaacaaggtaaccgtaggggaacctgcgg

SEQ ID NO: 48686 - DNA, 1492 bp, Yokenella regensburgei
attgaacgctggcggcaggcctaacacatgcaagtcgaacggtagcacagagagcttgctctcgggtgacgagtggcggacgggtgagtaatgtctgggaaactgcctgatggagggggataactactggaaacggtagctaataccgcataacgtcgcaagaccaaagagggggaccttcgggcctcttgccatcagatgtgcccagatgggattagctagtaggtggggtaacggctcacctaggcgacgatccctagctggtctgagaggatgaccagccacactggaactgagacacggtccagactcctacgggaggcagcagtggggaatattgcacaatgggcgcaagcctgatgcagccatgccgcgtgtatgaagaaggccttcgggttgtaaagtactttcagcgaggaggaaggcgatacggttaataaccgtgtcgattgacgttactcgcagaagaagcaccggctaactccgtgccagcagccgcggtaatacggagggtgcaagcgttaatcggaattactgggcgtaaagcgcacgcaggcggtctgtcaagtcggatgtgaaatccccgggctcaacctgggaactgcattcgaaactggcaggcttgagtcttgtagaggggggtagaattccaggtgtagcggtgaaatgcgtagagatctggaggaataccggtggcgaaggcggccccctggacaaagactgacgctcaggtgcgaaagcgtggggagcaaacaggattagataccctggtagtccacgccgtaaacgatgtcgacttggaggttgtgcccttgaggcgtggcttccggagctaacgcgttaagtcgaccgcctggggagtacggccgcaaggttaaaactcaaatgaattgacgggggcccgcacaagcggtggagcatgtggtttaattcgatgcaacgcgaagaaccttacctactcttgacatccacagaacttagcagagatgctttggtgccttcgggaaccgtgagacaggtgctgcatggctgtcgtcagctcgtgttgtgaaatgttgggttaagtcccgcaacgagcgcaacccttatcctttgttgccagcggttcggccgggaactcaaaggagactgccagtgataaactggaggaaggtggggatgacgtcaagtcatcatggcccttacgagtagggctacacacgtgctacaatggcatatacaaagagaagcgacctcgcgagagcaagcggacctcataaagtatgtcgtagtccggattggagtctgcaactcgactccatgaagtcggaatcgctagtaatcgtggatcagaatgccacggtgaatacgttcccgggccttgtacacaccgcccgtcacaccatgggagtgggttgcaaaagaagtaggtagcttaaccttcgggagggcgcttaccactttgtgattcatgactggggtgaagtcgtaacaaggtaaccgtaggggaacc

SEQ ID NO: 48687 - DNA, 1519 bp, Yokenella regensburgei
tagagtttgatcatggctcagattgaacgctggcggcaggcctaacacatgcaagtcgaacggtagcacagagagcttgctctcgggtgacgagtggcggacgggtgagtaatgtctgggaaactgcctgatggagggggataactactggaaacggtagctaataccgcataacgtcgcaagaccaaagagggggaccttcgggcctcttgccatcagatgtgcccagatgggattagctagtaggtggggtaacggctcacctaggcgacgatccctagctggtctgagaggatgaccagccacactggaactgagacacggtccagactcctacgggaggcagcagtggggaatattgcacaatgggcgcaagcctgatgcagccatgccgcgtgtatgaagaaggccttcgggttgtaaagtactttcagcgaggaggaaggcgatacggttaataaccgtgtcgattgacgttactcgcagaagaagcaccggctaactccgtgccagcagccgcggtaatacggagggtgcaagcgttaatcggaattactgggcgtaaagcgcacgcaggcggtctgtcaagtcggatgtgaaatccccgggctcaacctgggaactgcattcgaaactggcaggcttgagtcttgtagaggggggtagaattccaggtgtagcggtgaaatgcgtagagatctggaggaataccggtggcgaaggcggccccctggacaaagactgacgctcaggtgcgaaagcgtggggagcaaacaggattagataccctggtagtccacgccgtaaacgatgtcgacttggaggttgtgcccttgaggcgtggcttccggagctaacgcgttaagtcgaccgcctggggagtacggccgcaaggttaaaactcaaatgaattgacgggggcccgcacaagcggtggagcatgtggtttaattcgatgcaacgcgaagaaccttacctactcttgacatccacagaacttagcagagatgctttggtgccttcgggaactgtgagacaggtgctgcatggctgtcgtcagctcgtgttgtgaaatgttgggttaagtcccgcaacgagcgcaacccttatcctttgttgccagcggttcggccgggaactcaaaggagactgccagtgataaactggaggaaggtggggatgacgtcaagtcatcatggcccttacgagtagggctacacacgtgctacaatggcatatacaaagagaagcgacctcgcgagagcaagcggacctcataaagtatgtcgtagtccggattggagtctgcaactcgactccatgaagtcggaatcgctagtaatcgtggatcagaatgccacggtgaatacgttcccgggccttgtacacaccgcccgtcacaccatgggagtgggttgcaaaagaagtaggtagcttaaccttcgggagggcgcttaccactttgtgattcatgactggggtgaagtcgtaacaaggtaaccgtaggggaacctgcggt

SEQ ID NO: 48688 - DNA, 1508 bp, Streptococcus urinalis
ggctcaggacgaacgctggcggcgtgcctaatacatgcaagtagaacgctgaggtcatgtgcttgcacaagaccaaggagttgcgaacgggtgagtaacgcgtaggtaacctgcctcatagcgggggataactattggaaacgatagctaataccgcatgagagtttttaacacatgttaggaacttaaaaggagcaactgcttcactatgagatggacctgcgttgtattagctagttggtgaggtaacggctcaccaaggcgacgatacatagccgacctgagagggtgatcggccacactgggactgagacacggcccagactcctacgggaggcagcagtagggaatcttcggcaatgggggcaaccctgaccgagcaacgccgcgtgagtgaagaaggttttcggatcgtaaagctctgttgttagagaagaatggaagtaggagtggaaagtctacttcgtgacggtaactaaccagaaagggacggctaactacgtgccagcagccgcggtaatacgtaggtcccgagcgttgtccggatttattgggcgtaaagcgagcgcaggcggttctataagtctgaagttaaaggcagtggctcaaccattgttcgctttggaaactgtagaacttgagtgcagaaggggagagtggaattccatgtgtagcggtgaaatgcgtagatatatggaggaacaccggtggcgaaagcggctctctggtctgtaactgacgctgaggctcgaaagcgtggggagcaaacaggattagataccctggtagtccacgccgtaaacgatgagtgctaggtgttaggccctttccggggcttagtgccgcagctaacgcattaagcactccgcctggggagtacgaccgcaaggttgaaactcaaaggaattgacgggggcccgcacaagcggtggagcatgtggtttaattcgaagcaacgcgaagaaccttaccaggtcttgacatcccgatgcccgctctagagatagagttttacttcggtacatcggagacaggtggtgcatggttgtcgtcagctcgtgtcgtgagatgttgggttaagtcccgcaacgagcgcaacccctattgttagttgccatcattcagttgggcactctagcaagactgccggtaataaaccggaggaaggtggggatgacgtcaaatcatcatgccccttatgacctgggctacacacgtgctacaatggttggtacaacgagtcgcaagtcggtgacgacaagctaatctcttaaagccaatctcagttcggattgtaggctgcaactcgcctacatgaagtcggaatcgctagtaatcgcggatcagcacgccgcggtgaatacgttcccgggccttgtacacaccgcccgtcacaccacgagagtttgtaacacccgaagtcggtgaggtaaccttttaggagccagccgcctaaggtgggatagatgattggggtgaagtcgtaacaaggtagccgtatcggaagg

SEQ ID NO: 48689 - DNA, 1525 bp, Enterobacter hormaechei
agcatgacacgaaggaggtgatccacccgcaggttcccctacggttaccttgttacgacttcaccccagtcatgaatcacaaagtgggtaagcgccctcccgaaggttaagctacctacttcttttgcaacccactcccatggtgtgacgggcggtgtgtacaaggcccgggaacgtattcaccgtggcattctgatccacgattactagcgattccgacttcatggagtcgagttgcagactccaatccggactacgacgcactttatgaggtccgcttgctctcgcgaggtcgcttctctttgtatgcgccattgtagcacgtgtgtagccctactcgtaagggccatgatgacttgacgtcatccccaccttcctccagtttatcactggcagtctcctttgagttcccggcctaaccgctggcaacaaaggataagggttgcgctcgttgcgggacttaacccaacatttcacaacacgagctgacgacagccatgcagcacctgtctcagagttcccgaaggcaccaaagcatctctgctaagttctctggatgtcaagagtaggtaaggttcttcgcgttgcatcgaattaaaccacatgctccaccgcttgtgcgggcccccgtcaattcatttgagttttaaccttgcggccgtactccccaggcggtcgacttaacgcgttagctccggaagccacgcctcaagggcacaacctccaagtcgacatcgtttacggcgtggactaccagggtatctaatcctgtttgctccccacgctttcgcacctgagcgtcagtctttgtccagggggccgccttcgccaccggtattcctccagatctctacgcatttcaccgctacacctggaattctacccccctctacaagactctagcctgccagtttcgaatgcagttcccaggttgagcccggggatttcacatccgacttgacagaccgcctgcgtgcgctttacgcccagtaattccgattaacgcttgcaccctccgtattaccgcggctgctggcacggagttagccggtgcttcttctgcgggtaacgtcaattgctgaggttattaacctcatcgccttcctccccgctgaaagtactttacaacccgaaggccttcttcatacacgcggcatggctgcatcaggcttgcgcccattgtgcaatattccccactgctgcctcccgtaggagtctggaccgtgtctcagttccagtgtggctggtcatcctctcagaccagctagggatcgtcgcctaggtgagccgttaccccacctactagctaatcccatctgggcacatccgatggcaagaggcccgaaggtccccctctttggtcttgcgacgttatgcggtattagctaccgtttccagtagttatccccctccatcaggcagtttcccagacattactcacccgtccgccactcgtcagcgaagcagcaagctgcttcctgttaccgttcgacttgcatgtgttaggcctaaaaaagcgttcatc

SEQ ID NO: 48690 - DNA, 1485 bp, Bacteroides capilosus
  misc_feature (456)..(456): n is a, c, g, or t
gatgaacgctggcggcgtgcttaacacatgcaagtcgaacggagagctcatgacagaggattcgtccaatggattgggtttcttagtggcggacgggtgagtaacgcgtgaggaacctgcctcggagtggggaataacagtccgaaaggactgctaataccgcataatgcagctgagtcgcatgacactggctgccaaagatttatcgctctgagatggcctcgcgtctgattagctagttggcggggtaacggcccaccaaggcgacgatcagtagccggactgagaggttggccggccacattgggactgagacacggcccagactcctacgggaggcagcagtggggaatattgggcaatgggcgcaagcctgacccagcaacgccgcgtgaaggatgaaggctttcgggttgtaaacttcttttatcagggacgaaataaatgacggtactngatgaataagccacggctaactacgtgccagcagccgcggtaatacgtaggtggcaagcgttatccggatttactgggtgtaaagggcgtgtaggcgggactgcaagtcagggtgtgaaaaccacgggctcaacctgtggcctgcatttgaaactgtagttcttgagtgctggagaggcaatcggaattccgtgtgtagcggtgaaatgcgtagatatacggaggaacaccagtggcgaaggcggattgctggacagtaactgacgctgaggcgcgaaagcgtggggagcaaacaggattagataccctggtagtccacgccgtaaacgatggatactaggtgtggggggactgaccccctccgtgccgcagttaacacaataagtatcccacctggggagtacgatcgcaaggttgaaactcaaaggaattgacgggggcccgcacaagcggtggagtatgtggtttaattcgaagcaacgcgaagaaccttaccagggcttgacatccgactaacgaagcagagatgcattaggtgcccttcggggaaagtcgagacaggtggtgcatggttgtcgtcagctcgtgtcgtgagatgttgggttaagtcccgcaacgagcgcaacccttattgttagttgctacgcaagagcactctagcgagactgccgttgacaaaacggaggaaggtggggacgacgtcaaatcatcatgccccttatgtcctgggccacacacgtactacaatggtggttaacagagggaagcaatgccgcgaggtggagcaaatccctaaaagccatcccagttcggattgcaggctgaaacccgcctgtatgaagttggaatcgctagtaatcgcggatcagcatgccgcggtgaatacgttcccgggccttgtacacaccgcccgtcacaccatgagagtcgggaacacccgaagtccgtagcctaaccgcaaggagggcgcggccgaaggtgggttcgataattggggtgaagtcgtaacaaggtagccgtatcggaagg

SEQ ID NO: 48691 - DNA, 1418 bp, Morganella morganii sp. sibonii
cgagcggcggacgggtgagtaatgtatggggatctgcctgatggagggggataactactggaaacggtagctaataccgcataatgtccacggaccaaagcgggggaccttcgggcctcgcaccatcagatgaacccatatgggattagcttgtaggtgaggtaacggctcacctaggcgacgatccctagctggtctgagaggatgatcagccacactgggactgagacacggcccagactcctacgggaggcagcagtggggaatattgcacaatgggcgcaagcctgatgcagccatgccgcgtgtatgaagaaggccttcgggttgtaaagtactttcagtcgggaggaaggtgttaaggttaataaccttggcaattgacgttaccgacagaagaagcaccggctaactccgtgccagcagccgcggtaatacggagggtgcaagcgttaatcggaattactgggcgtaaagcgcacgcaggcggttgattgagtcagatgtgaaatccccgggcttaacccgggaattgcatctgatactggtcagctagagtcttgtagaggggggtagaattccatgtgtagcggtgaaatgcgtagagatgtggaggaataccggtggcgaaggcggccccctggacaaagactgacgctcaggtgcgaaagcgtggggagcaaacaggattagataccctggtagtccacgctgtaaacgatgtcgacttggaggttgtgcccttgaggcgtggcttccggagctaacgcgttaagtcgaccgcctggggagtacggccgcaaggttaaaactcaaatgaattgacgggggcccgcacaagcggtggagcatgtggtttaattcgatgcaacgcgaagaaccttacctactcttgacatccagagaacttagcagagatgctttggtgccttcgggaactctgagacaggtgctgcatggctgtcgtcagctcgtgttgtgaaatgttgggttaagtcccgcaacgagcgcaacccttatcctttgttgccagcgcgtgatggcgggaactcaaaggagactgccggtgataaaccggaggaaggtggggatgacgtcaagtcatcatggcccttacgagtagggctacacacgtgctacaatggcgtatacaaagggaagcgaccctgcgaaggcaagcggaactcataaagtacgtcgtagtccggattggagtctgcaactcgactccatgaagtcggaatcgctagtaatcgtagatcagaatgctacggtgaatacgttcccgggccttgtacacaccgcccgtcacaccatgggagtgggttgcaaaagaagtaggtagcttaaccttcgggagggcgcttaccactttgtgattcatgactggggtgaagtcgtaacaaggtaaccgtagg

SEQ ID NO: 48692 - DNA, 1418 bp, Morganella morganii sp. sibonii; identical to SEQ ID NO: 48691

SEQ ID NO: 48693 - DNA, 1527 bp, Morganella morganii sp. morganii
gatcatggctcagattgaacgctggcggcaggcctaagcacatgcaagtcgggcggtaacagggagaagcttgcttctctgctgacgagcggcggacgggtgagtaatgtatggggatctgcctgatggcgggggataactactggaaacggtagctaataccgcataatgtcttcggaccaaagcgggggacctccgggcctcgcgccatcagatgaacccatatgggattagctagtaggtgaggtaacggcttacctaggcgacgatccctagctggtctgagaggatgatcagccacactgggactgagacacggcccagactcctacgggaggcagcagtggggaatattgcacaatgggcgcaagcctgatgcagccatgccgcgtgtatgaagaaggccttcgggttgtaaagtactttcagtcgggaggaaggtggcaaggttaataaccttggcaattgacgttaccgacagaagaagcaccggctaactccgtgccagcagccgcggtaatacggagggtgcaagcgttaatcggaattactgggcgtaaagcgcacgcaggcggttgattgagtcagatgtgaaatccccgggcttaacccgggaattgcatctgatactggtcagctagagtcttgtagaggggggtagaattccatgtgtagcggtgaaatgcgtagagatgtggaggaataccggtggcgaaggcggccccctggacaaagactgacgctcaggtgcgaaagcgtggggagcaaacaggattagataccctggtagtccacgctgtaaacgatgtcgacttggaggttgtgcccttgaggcgtggcttccggagctaacgcgttaagtcgaccgcctggggagtacggccgcaaggttaaaactcaaatgaattgacgggggcccgcacaagcggtggagcatgtggtttaattcgatgcaacgcgaagaaccttacctactcttgacatccagagaacttggcagagatgctttggtgccttcgggaactctgagacaggtgctgcatggctgtcgtcagctcgtgttgtgaaatgttgggttaagtcccgcaacgagcgcaacccttatcctttgttgccagcgcgtgatggcgggaactcaaaggagactgccggtgataaaccggaggaaggtggggatgacgtcaagtcatcatggcccttacgagtagggctacacacgtgctacaatggcgtatacaaagggaagcgaccccgcgagggcaagcggaactcataaagtacgtcgtagtccggattggagtctgcaactcgactccatgaagtcggaatcgctagtaatcgtagatcagaatgctacggtgaatacgttcccgggccttgtacacaccgcccgtcacaccatgggagtgggttgcaaaagaagtaggtagcttaacctccgggagggcgcttaccactttgtgattcatgactggggtgaagtcgtaacaaggtaaccgtaggggaacctgcggttggatcacctcc

SEQ ID NO: 48694 - DNA, 16 bp, Artificial Sequence
  Synthetic oligonucleotide primer
gcggacgggtgagtaa

SEQ ID NO: 48695 - DNA, 19 bp, Artificial Sequence
  Synthetic oligonucleotide primer
actgagacacggtccagac

SEQ ID NO: 48696 - DNA, 17 bp, Artificial Sequence
  Synthetic oligonucleotide primer
actgctgcctcccgtag

SEQ ID NO: 48697 - DNA, 18 bp, Artificial Sequence
  Synthetic oligonucleotide primer
gtgccagcagccgcggta

SEQ ID NO: 48698 - DNA, 18 bp, Artificial Sequence
  Synthetic oligonucleotide primer
gawtyaytgggcgtaaag

SEQ ID NO: 48699 - DNA, 18 bp, Artificial Sequence
  Synthetic oligonucleotide primer
caaacaggattagatacc

SEQ ID NO: 48700 - DNA, 18 bp, Artificial Sequence
  Synthetic oligonucleotide primer
tggactaccagggtatct

SEQ ID NO: 48701 - DNA, 18 bp, Artificial Sequence
  Synthetic oligonucleotide primer
gcatgtggtttaattcga

SEQ ID NO: 48702 - DNA, 17 bp, Artificial Sequence
  Synthetic oligonucleotide primer
tcgaattaaaccacatg

SEQ ID NO: 48703 - DNA, 19 bp, Artificial Sequence
  Synthetic oligonucleotide primer
aaggtggggatgacgtcaa

SEQ ID NO: 48704 - DNA, 19 bp, Artificial Sequence
  Synthetic oligonucleotide primer
cattgtagcacgtgtgtag

SEQ ID NO: 48705 - DNA, 15 bp, Artificial Sequence
  Synthetic oligonucleotide primer
caccaactagctaat

SEQ ID NO: 48706 - DNA, 18 bp, Artificial Sequence
  Synthetic oligonucleotide primer
taccgcggctgctggcac

SEQ ID NO: 48707 - DNA, 14 bp, Bacteroides merdae
acccgtgcgccggt

SEQ ID NO: 48708 - DNA, 14 bp, Bacteroides stercoris
acccgtgcgccggt

SEQ ID NO: 48709 - DNA, 25 bp, Bacteroides vulgatus
aatcctgtttgatacccacactttc

SEQ ID NO: 48710 - DNA, 21 bp, Enterococcus faecalis
ttcggatcgtaaaactctgtt

SEQ ID NO: 48711 - DNA, 24 bp, Clostridium tetani
gcgaagaaccttacctagacttga

SEQ ID NO: 48712 - DNA, 20 bp, Eikenella corrodens
ccgcatacgtcctaagggag

SEQ ID NO: 48713 - DNA, 21 bp, Kingella denitrificans
cgcgaagaaccttacctggtc

SEQ ID NO: 48714 - DNA, 21 bp, Neisseria gonorrhoeae
gccttcgggttgtaaaggact

SEQ ID NO: 48715 - DNA, 19 bp, Haemophilus ducreyi
ctttcggtgatgaggaagg

SEQ ID NO: 48716 - DNA, 21 bp, Clostridium difficile
gcaacgcgaagaaccttacct

SEQ ID NO: 48717 - DNA, 22 bp, Bacteroides thetaiotaomicron
cgggcttaaattgcatttgaat

SEQ ID NO: 48718 - DNA, 17 bp, Cardiobacterium hominis
caatgccgcgtgtgtga

SEQ ID NO: 48719 - DNA, 23 bp, Clostridium botulinum
caacgcgaagaaccttacctaga

SEQ ID NO: 48720 - DNA, 18 bp, Clostridium septicum
aacacgtgggcaacctgc

SEQ ID NO: 48721 - DNA, 28 bp, Haemophilus ducreyi
ccttacctactcttgacatccatagaag

SEQ ID NO: 48722 - DNA, 23 bp, Morganella morganii
cacgtgctacaatggcgtataca

SEQ ID NO: 48723 - DNA, 23 bp, Oligella urethralis
cccccctctgacatactctagct

SEQ ID NO: 48724 - DNA, 24 bp, Proteus mirabilis
aaggccttagggttgtaaagtact

SEQ ID NO: 48725 - DNA, 22 bp, Providencia stuartii
cgtgtatgaagaaggccctagg

SEQ ID NO: 48726 - DNA, 24 bp, Streptococcus agalactiae
cggatcgtaaagctctgttgttag

SEQ ID NO: 48727 - DNA, 32 bp, Bacteroides merdae
gccatcaatctgtattgctacaaatcatgctg

SEQ ID NO: 48728 - DNA, 28 bp, Bacteroides vulgatus
agcctcaatgtcagttgcagcttagcag

SEQ ID NO: 48729 - DNA, 26 bp, Bacteroides stercoris
tccatcaaagcaagctttgatgatgc

SEQ ID NO: 48730 - DNA, 29 bp, Oligella urethralis
cagttaatagtgcagttccgaggttgagc

SEQ ID NO: 48731 - DNA, 28 bp, Oligella urethralis
agttaatagtgcagttccgaggttgagc

SEQ ID NO: 48732 - DNA, 22 bp, Bacteroides merdae
cttaacacatgcaagtcgaggg

SEQ ID NO: 48733 - DNA, 22 bp, Bacteroides stercoris
cttaacacatgcaagtcgaggg

SEQ ID NO: 48734 - DNA, 18 bp, Bacteroides vulgatus
ctccgattgcgaaggcag

SEQ ID NO: 48735 - DNA, 20 bp, Enterococcus faecalis
ggctttctggttagataccg

SEQ ID NO: 48736 - DNA, 19 bp, Clostridium tetani
tgtatccctgtccccgaag

SEQ ID NO: 48737 - DNA, 21 bp, Eikenella corrodens
gcctttaccccaccaactagc

SEQ ID NO: 48738 - DNA, 16 bp, Kingella denitrificans
cggctcccgaaggcac

SEQ ID NO: 48739 - DNA, 25 bp, Neisseria gonorrhoeae
tagttagccggtgcttattcttcag

SEQ ID NO: 48740 - DNA, 16 bp, Haemophilus ducreyi
cggagttagccggtgc

SEQ ID NO: 48741 - DNA, 19 bp, Clostridium difficile
cgacaaccatgcaccacct

SEQ ID NO: 48742 - DNA, 18 bp, Bacteroides thetaiotaomicron
cgacaaccatgcagcacc

SEQ ID NO: 48743 - DNA, 20 bp, Cardiobacterium hominis
gccggtgcttcttctgtagg

SEQ ID NO: 48744 - DNA, 19 bp, Clostridium botulinum
cgacaaccatgcaccacct

SEQ ID NO: 48745 - DNA, 24 bp, Clostridium septicum
gctgcaatgttatgcggtattaat

SEQ ID NO: 48746 - DNA, 18 bp, Haemophilus ducreyi
gacgacagccatgcagca

SEQ ID NO: 48747 - DNA, 24 bp, Morganella morganii
tccggactacgacgtactttatga

SEQ ID NO: 48748 - DNA, 17 bp, Oligella urethralis
cggtgtgaaatcccggg

SEQ ID NO: 48749 - DNA, 19 bp, Proteus mirabilis
ttagccggtgcttcttctg

SEQ ID NO: 48750 - DNA, 22 bp, Providencia stuartii
cttctgtcggtaacgtcaatcg

SEQ ID NO: 48751 - DNA, 23 bp, Streptococcus agalactiae
ccctttctggttagttaccgtca

SEQ ID NO: 48752 - DNA, 39 bp, Artificial Sequence
  Synthetic oligonucleotide primer
ctgtaaaacgacggccagtagagtttgatcmtggctcag

SEQ ID NO: 48753 - DNA, 39 bp, Artificial Sequence
  Synthetic oligonucleotide primer
ctgtaaaacgacggccagtagagtttgatcatggctcag

SEQ ID NO: 48754 - DNA, 34 bp, Artificial Sequence
  Synthetic oligonucleotide primer
ctgtaaaacgacggccagtgctaactmcgtgcca

SEQ ID NO: 48755 - DNA, 37 bp, Artificial Sequence
  Synthetic oligonucleotide primer
ctgtaaaacgacggccagtgtgccagcagccgcggta

SEQ ID NO: 48756 - DNA, 35 bp, Artificial Sequence
  Synthetic oligonucleotide primer
aggaaacagctatgaccatgtgctggcackgagtt

SEQ ID NO: 48757 - DNA, 38 bp, Artificial Sequence
  Synthetic oligonucleotide primer
aggaaacagctatgaccatgtattaccgcggctgctgg

SEQ ID NO: 48758 - DNA, 35 bp, Artificial Sequence
  Synthetic oligonucleotide primer
ctgtaaaacgacggccagtgagcraacaggattag

SEQ ID NO: 48759 - DNA, 36 bp, Artificial Sequence
  Synthetic oligonucleotide primer
aggaaacagctatgaccatgaccagggtatctaatc

SEQ ID NO: 48760 - DNA, 35 bp, Artificial Sequence
  Synthetic oligonucleotide primer
ctgtaaaacgacggccagtcgtcagctcgtgtygt

SEQ ID NO: 48761 - DNA, 35 bp, Artificial Sequence
  Synthetic oligonucleotide primer
aggaaacagctatgaccatgcacgagctgacgaca

SEQ ID NO: 48762 - DNA, 36 bp, Artificial Sequence
  Synthetic oligonucleotide primer
aggaaacagctatgaccatgcccaacatttcacaac

SEQ ID NO: 48763 - DNA, 40 bp, Artificial Sequence
  Synthetic oligonucleotide primer
aggaaacagctatgaccatgaaggaggtgatccaaccgca

SEQ ID NO: 48764 - DNA, 23 bp, Staphylococcus chromognes
agactggaataactccgggaaac

SEQ ID NO: 48765 - DNA, 18 bp, Prevotella oralis
gcacgggtgagtaacgcg

SEQ ID NO: 48766 - DNA, 26 bp, Staphylococcus simulans
ggctaataccggataacacatgaaac

SEQ ID NO: 48767 - DNA, 23 bp, Moraxella atlantae
aaatgcgtagagatctggaggaa

SEQ ID NO: 48768 - DNA, 28 bp, Kocuria rosea
ctaatactggatactacctcttaccgca

SEQ ID NO: 48769 - DNA, 30 bp, Kocuria rosea
ggtgggtggtggaaagggttttactggttt

SEQ ID NO: 48770 - DNA, 21 bp, Staphylococcus chromognes
tgacagcaagaccgtctttca

SEQ ID NO: 48771 - DNA, 18 bp, Prevotella oralis
ttaggccgcctttcaacg

SEQ ID NO: 48772 - DNA, 21 bp, Staphylococcus simulans
cgcgggtccatctataagtga

SEQ ID NO: 48773 - DNA, 21 bp, Moraxella atlantae
gctttcgggtctgagtgtcag

SEQ ID NO: 48774 - DNA, 19 bp, Kocuria rosea
agctgataggccgtgagcc

SEQ ID NO: 48775 - DNA, 13 bp, Enterococcus sp.
tgyaggcgagttg

SEQ ID NO: 48776 - DNA, 55 bp, Clostridium septicum
tgtagaggggaatagcctcccgaaagggagattaataccgcataacattgcagct

SEQ ID NO: 48777 - DNA, 55 bp, Clostridium septicum; identical to SEQ ID NO: 48776

SEQ ID NO: 48778 - DNA, 55 bp, Clostridium tertium
tgtagaggggaatagccttccgaaaggaagattaataccgcataacattacattt

SEQ ID NO: 48779 - DNA, 55 bp, Clostridium barati
catagaggggaatagcctcccgaaagggagattaataccgcataacattgcagtt

SEQ ID NO: 48780 - DNA, 55 bp, Eubacterium moniliforme
tgtagaggggaatagccttccgaaaggaagattaataccgcataatattgtactt

SEQ ID NO: 48781 - DNA, 55 bp, Clostridium subterminale
tatagagggggatagccttccgaaaggaagattaataccgcataatatgttttta

SEQ ID NO: 48782 - DNA, 55 bp, Clostridium hastiforme
tttacaaagggatagcctcgggaaactgggattaataccttatgacacttaaatg

SEQ ID NO: 48783 - DNA, 55 bp, Artificial Sequence
  Consensus sequence
  misc_feature (53)..(53): n is a, c, g, or t
tdtagaggggratagcctyccgaaaggragattaataccgcataayattdhanyd

SEQ ID NO: 48784 - DNA, 20 bp, Artificial Sequence
  Synthetic oligonucleotide primer
agagtttgatcatggctcag

SEQ ID NO: 48785 - DNA, 21 bp, Artificial Sequence
  Synthetic oligonucleotide primer
gaaggaggtgatccaaccgca

SEQ ID NO: 48786 - DNA, 20 bp, Artificial Sequence
  Synthetic oligonucleotide primer
catgcaagtcgagcgaacag

SEQ ID NO: 48787 - DNA, 20 bp, Artificial Sequence
  Synthetic oligonucleotide primer
gctgcctcccgtaggagtct

SEQ ID NO: 48788 - DNA, 30 bp, Artificial Sequence
  Synthetic oligonucleotide probe
gtcacttatagatggacccgcggcgtatta
